(19) United States
(12) Patent Application Publication
(10) Pub. No.: US 2003/0134283 A1
(43) Pub. Date: Jul. 17, 2003

(54) Genes regulated in dendritic cell differentiation

(76) Inventors: David P. Peterson, San Jose, CA (US); Cecilia I. Pearson, Palo Alto, CA (US); Benjamin G. Cocks, Sunnyvale, CA (US)

Correspondence Address: INCYTE GENOMICS, INC., 3160 PORTER DRIVE, PALO ALTO, CA, 94304, US

(21) Appl. No.: 09/971,392

(22) Filed: Oct. 3, 2001

Related U.S. Application Data
(60) Provisional application No. 60/237,652, filed on Oct. 3, 2000.

(51) Int. Cl. C12Q 1/68; C07H 21/04

(52) U.S. Cl. 435/6; 536/23.1

(57) ABSTRACT

The present invention relates to a combination comprising a plurality of cDNAs which are differentially expressed in dendritic cells, which may be used in their entirety or in part to diagnose, to stage, to treat, or to monitor the treatment of a subject with cancer, infectious disease, autoimmunity, allergy, and graft versus host disease or to enhance a vaccine.

### FIELD OF THE INVENTION

[0001] The present invention relates to a combination comprising a plurality of cDNAs which are differentially expressed in dendritic cells and which may be used entirely or in part to diagnose, to stage, to treat, or to monitor the progression or treatment of disorders such as cancer, infectious disease, autoimmunity, allergy, and graft versus host disease.

### BACKGROUND OF THE INVENTION

[0002] Array technology can provide a simple way to explore the expression of a single polymorphic gene or the expression profile of a large number of related or unrelated genes. When the expression of a single gene is examined, arrays are employed to detect the expression of that specific gene or its variants. When an expression profile is examined, arrays provide a platform for examining which genes are tissue specific, carrying out housekeeping functions, parts of a signaling cascade, or specifically related to a particular genetic predisposition, condition, disease, or disorder.

[0003] The potential application of gene expression profiling is particularly relevant to characterizing lineage differences during cellular development that will improve diagnosis, prognosis, and treatment of disease. For example, both the levels and sequences expressed in dendritic cells from subjects with autoimmunity may be compared with the levels and sequences expressed in dendritic cells from normal subjects.

[0004] Dendritic cells (DC) are antigen presenting cells (APC) that play a key role in the primary immune response because of their unique ability to present antigens to naive T cells. In addition, DC differentiate into separate subsets that sustain and regulate immune responses following initial contact with antigen. DC subsets include those that preferentially induce particular T helper 1 (Th1) or T helper 2 (Th2) responses and those that regulate B cell responses. Moreover, DC are increasingly being used to manipulate immune responses, either to downregulate an aberrant autoimmune response or to enhance vaccination or a tumor-specific response.

[0005] DC are functionally specialized in correlation with their particular differentiation state. CD34+ myeloid cells found in the bone marrow mature in response to as yet unclear signals into CD14+ CD11c+ monocytes. An innate or antigen non-specific response takes place initially when monocytes circulate to nonlymphoid tissues and respond to lipopolysaccharide (LPS), a bacterially-derived mitogen, and viruses. Such direct encounter with antigen causes secretion of pro-inflammatory cytokines that attract and regulate natural killer cells, macrophages, and eosinophils in the first line of defense against invading pathogens. Monocytes then mature into DC, which capture antigen highly efficiently through endocytosis and antigen receptor uptake. Antigen processing and presentation trigger activation and differentiation into mature DC that express MHC class II molecules on the cell surface and efficiently activate T cells, initiating antigen-specific T cell and B cell responses. In turn, T cells activate DC through CD40 ligand-CD40 interactions, which stimulate expression of the costimulatory molecules CD80 and CD86, the latter most potent in amplifying T cell responses. DC interaction via CD40 with T cells also stimulates the production of inflammatory cytokines such as tumor necrosis factor alpha (TNF-α) and interleukin (IL)-1. Engagement of RANK, a member of the TNF receptor family by its ligand, TRANCE, which is expressed on activated T cells, enhances the survival of DC through inhibition of apoptosis, thereby enhancing T cell activation. The maturation and differentiation of monocytes into mature DC links the antigen non-specific innate immune response to the antigen-specific adaptive immune response.

[0006] The process by which monocytes differentiate into immature dendritic cells in vivo has not been fully elucidated. Incubation of monocytes with granulocyte-macrophage colony stimulating factor (GM-CSF) and IL4 in vitro yields cells that exhibit functional and morphological characteristics equivalent to immature dendritic cells found in vivo. Moreover, incubation in vitro of immature dendritic cells with TNF-α, CD40 ligand, LPS, or monocyte-conditioned medium yields mature dendritic cells that are potent activators of naive T cells.

[0007] The ability to manipulate DC in vitro and their capacity to mount an effective immune response with small numbers of DC and little antigen has led to: 1) potential immunotherapies for diseases such as cancer, AIDS, and infectious diseases, and 2) enhanced vaccine efficacy. Spontaneous remissions of particular cancers such as renal cell carcinomas and melanomas indicate that the immune system can respond to tumor antigens and eliminate tumors. However, tumors escape immune surveillance through a number of means including secretion of IL-10, macrophage colony stimulating factor, IL-6, and vascular endothelial growth factor, all of which inhibit the activity of DC and promote tolerance of tumor tissue. Delivery of tumor antigen-loaded DC to tumors can induce tumor-specific rejection in animal models. Similarly, pathogens can escape immune surveillance by altering antigen processing and presentation pathways or interfering with maturation of antigen presenting cells. Rather than providing resistance, DC can complicate infection by hosting latent viruses such as Kaposi's virus and cytomegalovirus, and producing HIV-1 and measles virus particles. Vaccines against tumors or infectious pathogens could be improved by systemic or local administration of DC loaded with tumor antigens or attenuated viral particles or components, respectively.

[0008] The expression of killer-inhibitor regulatory molecules, chemokines, chemokine receptors, and proteinases in DC has been verified through sequencing of ESTs. Continuing this search through the use of microarrays may reveal new lymphocyte-binding and antigen-processing molecules, transmembrane and secretory products, and transcription factors that may help to explain the specialized features of DC and allow manipulation of the immune system.

[0009] The present invention provides for a combination comprising a plurality of cDNAs for use in detecting expression of genes encoding proteins in DC. Such a combination satisfies a need in the art in that it can be employed for the improvement of vaccines, in the evaluation of candidates for tissue or organ transplant, and in the diagnosis, prognosis or treatment of cancer, infectious disease, autoimmunity, allergy, and graft versus host disease.

### SUMMARY

[0010] The present invention provides a combination comprising a plurality of cDNAs and their complements which are differentially expressed in dendritic cells (DC) and which are selected from SEQ ID NOs:1-260 as presented in the Sequence Listing. In one embodiment, each cDNA is downregulated in DC at least three-fold, SEQ ID NOs:1-29; in another embodiment, each cDNA is upregulated in DC at least three-fold, SEQ ID NOs:30-241; in another embodiment, each cDNA is upregulated in mature DC at least 2.5-fold, SEQ ID NOs:242-257; in yet another embodiment, each cDNA is downregulated in mature DC at least 2.5-fold, SEQ ID NOs:258-260. In one aspect, the combination is useful to characterize monocyte and dendritic cell populations from subjects with disorders such cancer, infectious disease, autoimmunity, allergy, and graft versus host disease. In a second aspect, the combination is useful in evaluation of subjects prior to tissue or organ transplant. In a third aspect, combination is useful in the diagnosis, progression, treatment or monitoring the treatment of cancer, infectious disease, autoimmunity, allergy, and graft versus host disease. In a fourth aspect, the combination is useful to enhance or to measure enhancement of dendritic cell function during immunotherapy of cancer or other disorders. In a fifth aspect, the combination is useful to measure suppression of dendritic cell function during immunotherapy. In a sixth aspect, the combination is useful to enhance the efficacy of vaccines. In a seventh aspect, the combination is immobilized on a substrate.

[0011] The invention provides a high throughput method to detect expression of a nucleic acid which is complementary at least one of the cDNAs of the combination in a sample. The method comprises hybridizing a substrate containing the combination with a sample containing nucleic acids under conditions to form at least one hybridization complex and detecting hybridization complex formation, wherein complex formation indicates expression of at least one complementary nucleic acid in the sample. In one aspect, the sample is from a subject with cancer and differential expression when compared to a standard determines the state of the immune response to the tumor. In another aspect, the sample is from a subject with cancer being treated with dendritic cell immunotherapy, and expression when compared to a standard determines efficacy of the treatment.

[0012] The invention also provides a high throughput method of screening a library or plurality of molecules or compounds to identify a ligand. The method comprises combining the combination with a library or a plurality of molecules or compounds under conditions to allow specific binding and detecting specific binding, thereby identifying a ligand. The library or plurality of molecules or compounds are selected from aptamers, DNA molecules, RNA molecules, peptide nucleic acid molecules, mimetics, peptides, transcription factors, repressors, and other regulatory proteins. The invention additionally provides a method for purifying a ligand, the method comprising combining a cDNA of the invention with a sample under conditions which allow specific binding, recovering the bound cDNA, and separating the cDNA from the ligand, thereby obtaining purified ligand.

[0013] The invention further provides an isolated cDNA selected from SEQ ID NOs:24-29, 187-202, 205-213, 216-241, 256, 257, 259, and 260 as presented in the Sequence Listing. The invention also provides a vector comprising the cDNA, a host cell comprising the vector, and a method for using a host cell to produce a protein comprising culturing the host cell under conditions for the expression of a protein and recovering the protein from the culture.

[0014] The present invention provides a purified protein encoded and produced by a cDNA of the invention. The invention also provides a high-throughput method for using a protein to screen a library or a plurality of molecules or compounds to identify a ligand. The method comprises combining the protein or a portion thereof with the library or plurality of molecules or compounds under conditions to allow specific binding and detecting specific binding, thereby identifying a ligand which specifically binds the protein. The library or plurality of molecules or compounds is selected from aptamers, DNA molecules, RNA molecules, peptide nucleic acid molecules, mimetics, peptides, proteins, agonists, antagonists, antibodies or their fragments, immunoglobulins, inhibitors, drug compounds, and pharmaceutical agents. The invention further provides for using a protein to purify a ligand. The method comprises combining the protein or a portion thereof with a sample under conditions to allow specific binding, recovering the bound protein, and separating the protein from the ligand, thereby obtaining purified ligand. The invention still further provides a composition comprising the protein and a pharmaceutical carrier.

[0015] The invention also provides methods for using a protein to prepare and purify polyclonal and monoclonal antibodies which specifically bind the protein. The method for preparing a polyclonal antibody comprises immunizing a animal with protein under conditions to elicit an antibody response, isolating animal antibodies, attaching the protein to a substrate, contacting the substrate with isolated antibodies under conditions to allow specific binding to the protein, dissociating the antibodies from the protein, thereby obtaining purified polyclonal antibodies. The method for preparing and purifying monoclonal antibodies comprises immunizing a animal with a protein under conditions to elicit an antibody response, isolating antibody producing cells from the animal, fusing the antibody producing cells with immortalized cells in culture to form monoclonal antibody producing hybridoma cells, culturing the hybridoma cells, and isolating from culture monoclonal antibodies which specifically bind the protein.

### DESCRIPTION OF THE SEQUENCE LISTING AND TABLES

[0016] A portion of the disclosure of this patent document contains material that is subject to copyright protection. The copyright owner has no objection to the facsimile reproduction by anyone of the patent document or the patent disclosure, as it appears in the Patent and Trademark Office patent file or records, but otherwise reserves all copyright rights whatsoever.

[0017] The Sequence Listing is a compilation of cDNAs obtained by sequencing and extending clone inserts. Each sequence is identified by a sequence identification number (SEQ ID NO) and by a template number (TEMPLATE ID).

[0018] Table 1 lists the functional annotation and differential expression of each cDNA that has previously been shown to be upregulated in DC. Columns 1 and 2 show the GenBank identification number (GENBANK ID) and functional annotation (DESCRIPTION), respectively, as determined by BLAST analysis, version 1.4 using default parameters (Altschul (1993) J Mol Evol 36:290-300; Altschul et al. (I 990) J Mol Biol 215:403410) of the cDNA against GenBank (release 117; National Center for Biotechnology Information (NCBI), Bethesda Md.). Column 3 shows the balanced differential expression value(s), BDE, produced by each clone that represented the cDNA in the experiment.

[0019] Tables 2-5 list the functional annotation and differential expression of the cDNAs of the present invention. Table 2 lists those cDNAs that are downregulated in DC; Table 3, cDNAs that are upregulated in DC; Table 4, cDNAs that are upregulated in mature DC; and Table 5, cDNAs that are downregulated in mature DC. In Tables 2-5, Columns 1, 2, and 3 show the SEQ ID NO, CLONE ID, and TEMPLATE ID, respectively. Columns 4 and 5 show the GenBank identification number (GENBANK ID) and functional annotation (DESCRIPTION), respectively, as determined by BLAST analysis of the cDNA against GenBank (release 117; NCBI). Column 6 shows the database from which functional annotation came. Column 7 shows the BDE for each clone that represents that cDNA. Of those sequences that are unique, only the SEQ ID NO, CLONE ID, TEMPLATE ID, and BDE are noted. For SEQ ID NOs:201-215, column 8 of Table 3 shows the E-VALUE for the template, as determined by BLASTx analysis.

### DESCRIPTION OF THE INVENTION

[0020] Definitions

[0021] Definitions

[0022] “Array” refers to an ordered arrangement of at least two cDNAs on a substrate. At least one of the cDNAs represents a control or standard sequence, and the other, a cDNA of diagnostic interest. The arrangement of from about two to about 40,000 cDNAs on the substrate assures that the size and signal intensity of each labeled hybridization complex formed between a cDNA and a sample nucleic acid is individually distinguishable.

[0023] The “complement” of a nucleic acid molecule of the Sequence Listing refers to a nucleotide sequence which is completely complementary over the full length of the sequence and which will hybridize to the nucleic acid molecule under conditions of high stringency.

[0024] A “combination” comprises at least two, alternatively about 10, and up to 292 sequences selected from the group consisting of SEQ ID NOs:1-292 as presented in the Sequence Listing.

[0025] “cDNA” refers to a chain of nucleotides, an isolated polynucleotide, a nucleic acid molecule, or any fragment or complement thereof. It may have originated recombinantly or synthetically, be double-stranded or single-stranded, coding and/or noncoding, an exon with, or without, an intron from a genomic DNA molecule, and purified or combined with carbohydrate, lipids, amino acids or inorganic elements or substances. Preferably, the cDNA is from about 400 to about 12000 nucleotides.

[0026] The phrase “cDNA encoding a protein” refers to a nucleic acid whose sequence closely aligns with sequences that encode conserved regions, motifs or domains identified by employing analyses well known in the art. These analyses include BLAST (Basic Local Alignment Search Tool; Altschul, supra; Altschul et al. (1993) supra) which provides identity within the conserved region. Brenner et al. (1998; Proc Natl Acad Sci 95:6073-6078) who analyzed BLAST for its ability to identify structural homologs by sequence identity found 30% identity is a reliable threshold for sequence alignments of at least 150 residues and 40% is a reasonable threshold for alignments of at least 70 residues (Brenner, page 6076, column 2).

[0027] “Derivative” refers to a cDNA or a protein that has been subjected to a chemical modification. Derivatization of a cDNA can involve substitution of a nontraditional base such as queosine or of an analog such as hypoxanthine. These substitutions are well known in the art. Derivatization of a protein involves the replacement of a hydrogen by an acetyl, acyl, alkyl, amino, formyl, or morpholino group. Derivative molecules retain the biological activities of the naturally occurring molecules but may confer advantages such as longer lifespan or enhanced activity.

[0028] “Differential expression” refers to an increased or upregulated or a decreased or downregulated expression as detected by absence, presence, or at least 2.5-fold change in the amount of transcribed messenger RNA or translated protein in a sample.

[0029] “Disorder” refers to conditions, diseases or syndromes which fall into the categories of cancer, infectious disease, autoimmunity, allergy, and graft versus host disease.

[0030] “Fragment” refers to a chain of consecutive nucleotides from about 200 to about 700 base pairs in length. Fragments may be used in PCR or hybridization technologies to identify identical or related nucleic acid molecules and in binding assays to screen for a ligand. Nucleic acids and ligands identified in this manner are useful as therapeutics to regulate replication, transcription or translation.

[0031] A “hybridization complex” is formed between a cDNA and a nucleic acid of a sample when the purines of one molecule hydrogen bond with the pyrimidines of the complementary molecule, e.g., 5′-A-G-T-C-3′ base pairs with 3′-T-C-A-G-5′. The degree of complementarity and the use of nucleotide analogs affect the efficiency and stringency of hybridization reactions.

[0032] “Identity” as applied to sequences, refers to the quantification (usually percentage) of nucleotide or residue matches between at least two sequences aligned using a standardized algorithm such as Smith-Waterman alignment (Smith and Waterman (1981) J Mol Biol 147:195-197), CLUSTALW (Thompson et al. (1994) Nucleic Acids Res 22:46734680), or BLAST2 (Altschul et al. (1997) supra). BLAST2 may be used in a standardized and reproducible way to insert gaps in one of the sequences in order to optimize alignment and to achieve a more meaningful comparison between them. “Similarity” as applied to proteins uses the same algorithms but takes into account conservative substitutions of nucleotides or residues.

[0033] “Ligand” refers to any agent, molecule, or compound which will bind specifically to a complementary site on a cDNA molecule or fragment thereof or to a protein or an epitope thereof. Such ligands stabilize or modulate the activity of polynucleotides or proteins and may be composed of inorganic or organic substances including nucleic acids, amino acids, carbohydrates, fats, and lipids.

[0034] “Oligonucleotide” refers a single stranded molecule from about 18 to about 60 nucleotides in length which may be used in hybridization or amplification technologies or in regulation of replication, transcription or translation. Equivalent terms include amplimer, primer, and oligomer.

[0035] “Portion” refers to any part of a protein used for any purpose which retains at least one biological or antigenic characteristic of a native protein, but especially, to an epitope for the screening of ligands or for production of antibodies.

[0036] “Post-translational modification” of a protein can involve lipidation, glycosylation, phosphorylation, acetylation, racemization, proteolytic cleavage, and the like. These processes may occur synthetically or biochemically. Biochemical modifications will vary by cellular location, cell type, pH, enzymatic milieu, and the like.

[0037] “Probe” refers to a cDNA that hybridizes to at least one nucleic acid molecule in a sample. Where targets are single stranded, probes are complementary single strands. Probes can be labeled with reporter molecules for use in hybridization reactions including Southern, northern, in situ, dot blot, array, and like technologies or in screening assays.

[0038] “Protein” refers to a polypeptide or any portion thereof. An “oligopeptide” is an amino acid sequence from about five residues to about 15 residues that is used as part of a fusion protein to produce an antibody.

[0039] “Purified” refers to any molecule or compound that is separated from its natural environment and is from about 60% free to about 90% free from other components with which it is naturally associated.

[0040] “Sample” is used in its broadest sense as containing nucleic acids, proteins, antibodies, and the like. A sample may comprise a bodily fluid; the soluble fraction of a cell preparation, or an aliquot of media in which cells were grown; a chromosome, an organelle, or membrane isolated or extracted from a cell; genomic DNA, RNA, or cDNA in solution or bound to a substrate; a cell; a tissue or tissue biopsy; a tissue print; a fingerprint, buccal cells, skin, or hair; and the like.

[0041] “Specific binding” refers to a special and precise interaction between two molecules which is dependent upon their structure, particularly their molecular side groups. For example, the intercalation of a regulatory protein into the major groove of a DNA molecule, the hydrogen bonding along the backbone between two single stranded nucleic acids, or the binding between an epitope of a protein and an agonist, antagonist, or antibody.

[0042] “Substrate” refers to any rigid or semi-rigid support to which cDNAs or proteins are bound and includes membranes, filters, chips, slides, wafers, fibers, magnetic or nonmagnetic beads, gels, capillaries or other tubing, plates, polymers, and microparticles with a variety of surface forms including wells, trenches, pins, channels and pores.

[0043] “Variant” refers to molecules that are recognized variations of a cDNA or a protein encoded by the cDNA. Splice variants may be determined by BLAST score, wherein the score is at least 100, and most preferably at least 400. Allelic variants have a high percent identity to the cDNAs and may differ by about three bases per hundred bases. “Single nucleotide polymorphism” (SNP) refers to a change in a single base as a result of a substitution, insertion or deletion. The change may be conservative (purine for purine) or non-conservative (purine to pyrimidine) and may or may not result in a change in an encoded amino acid.

[0044] The Invention

[0045] The present invention provides for a combination comprising a plurality of cDNAs or their complements, SEQ ID NOs:1-260, which can be used on a substrate to diagnose, to stage, to treat or to monitor the progression or treatment of a disorder such as cancer, infectious disease, autoimmunity, allergy, and graft versus host disease. These cDNAs represent known and novel genes differentially expressed in DC. The combination is used in its entirety or in part, as subsets of cDNAs downregulated in immature DC, SEQ ID NOs:1-29; cDNAs upregulated in immature DC, SEQ ID NOs:30-241; cDNAs upregulated in mature DC, SEQ ID NOs:242-257; or cDNAs downregulated in mature DC, SEQ ID NOs:258-260. SEQ ID NOs:24-29 represent novel cDNAs downregulated in immature DC; SEQ ID NOs:187-202, 205-213 and 216-241 represent novel cDNAs upregulated in immature DC; SEQ ID NOs:256 and 257 represent novel cDNAs upregulated in mature DC; and SEQ ID NOs:259 and 260 represent novel cDNAs downregulated in mature DC. Since the novel cDNAs were identified solely by their differential expression, it is not essential to know a priori the name, structure, or function of the gene or its encoded protein. The usefulness of the cDNAs exists in their immediate value as diagnostics.

[0046] In one embodiment, the combination is useful to characterize monocyte and dendritic cell populations from subjects with disorders such cancer, infectious disease, autoimmunity, allergy, and graft versus host disease. In a second embodiment, the combination is useful in evaluation of subjects prior to tissue or organ transplant. In a third embodiment, the combination is useful in the diagnosis, progression, treatment or monitoring the treatment of cancer, infectious disease, autoimmunity, allergy, and graft versus host disease. In a fourth embodiment, the combination is useful to enhance or to measure enhancement of dendritic cell function during immunotherapy of cancer or other disorders. In a fifth embodiment, the combination is useful to measure suppression of dendritic cell function during immunotherapy. In a sixth embodiment, the combination is useful to enhance the efficacy of vaccines. In a seventh embodiment, the combination is immobilized on a substrate.

[0047] Table 1 shows cDNAs that are upregulated in dendritic cells greater than three-fold and which have been previously shown in the literature to be expressed in dendritic cells. The types of cDNAs that are upregulated in concert during the transition from monocyte to dendritic cell reflect newly acquired DC functions, such as antigen uptake. Both Fc receptors and complement receptors which bind and endocytose antibody-antigen complexes are upregulated on DC. Heat shock proteins, which assist in the capture and transport of antigen, are upregulated approximately five-fold. Molecules involved in the formation of vesicles during endocytosis are upregulated, such as clathrin and clathrin-associated molecules. Fibronectin, which is upregulated up to 80-fold in dendritic cells, can enhance cell adhesion, migration, and proliferation. A large number of cDNAs encoding proteins that are involved in antigen processing and presentation are also upregulated in dendritic cells. These cDNAs include major histocompatibility complex (MHC) class II cDNAs, which encode proteins that present antigen to T cells; cDNAs encoding invariant chain, which is essential for assembly and antigen binding to MHC class II proteins; and cathepsin cDNAs, which encode proteases that reside in lysosomes and degrade antigen into peptides suitable for binding to MHC proteins. In addition, cDNAs encoding chemokines, which attract other immune cells, such as T cells and eosinophils, are upregulated in dendritic cells. Chemokines such as monocyte chemoattractant proteins 1, 2, and 4; eotaxin; thymus- and activation-regulated chemokine; macrophage inflammatory protein-1 alpha; and pulmonary and activation-regulated chemokine that attract both Th1 and Th2 type cells were upregulated, suggesting that immature DC retain their capacity to initiate different types of immune responses and have not yet acquired specialized functionality.

[0048] A number of cDNAs are downregulated three to 10-fold in DC relative to monocytes as shown in Table 2. Since these cDNAs include those that have been shown to be expressed in monocytes, but not in immature DC, the cDNAs shown in Table 2 probably have roles in monocyte function. Previously described monocyte-specific cDNAs include SEQ ID NO:4 and 5. These are cDNA variants that encode CL100 protein tyrosine phosphatase, which can suppress MAP kinase protection from apoptosis. Monocytes also express a number of cDNAs that are upregulated in cells stimulated with mitogen, such as those that regulate entry into the G₀/G₁ switch in the cell cycle. These cDNAs include SEQ ID NO:8, which encodes the cellular oncogene cfos, SEQ ID NO:11, which encodes GOS2 protein, and SEQ ID NOs:12 and 13, which are two variant cDNAs that encode a helix-loop-helix phosphoprotein (GOS8) involved in regulating G protein signaling.

[0049] Table 2 also shows cDNAs that have not previously been shown to be upregulated in monocytes. For example, two other phosphatases, SEQ ID NOs:9 and 14, are preferentially expressed in monocytes, and together with SEQ ID NOs:4 and 5 are involved in regulating kinases. Several clones representing pre-B cell enhancing factor (PBEF) and its 3′ UTR are upregulated three to six-fold over expression in dendritic cells (SEQ ID NOs:19-25). PBEF is expressed mainly in the bone marrow, liver, and muscle. Expression in bone marrow suggests involvement in the early differentiation stages of hematopoietic cells. The 3′ region of PBEF cDNA contains multiple TATT motifs, which are RNA destabilization sequences found in other upregulated genes including cfos, some of the genes regulating the G₀/G₁ switch in the cell cycle, and other cytokines. PBEF plays a role in the innate immune response by monocytes, since a PBEF homolog is upregulated in the innate immune response of sponges upon contact with xenogeneic sponge tissue. In the immune system, 29% of PBEF transcripts are found in libraries derived from activated granulocytes, monocytes, macrophages, and dendritic cells. Another indication that monocytes are involved in the innate immune response is the expression of a cDNA encoding a chemokine, SCM-1 beta (SEQ ID NO:7) that is constitutively expressed in natural killer cells.

[0050] SEQ ID NOs:26-29 are unique cDNAs. SEQ ID NO:26 is upregulated greater than three-fold and encodes a protein about 30% identical to CG9591, an uncharacterized protein expressed in Drosophila melanogaster. SEQ ID NO:26 encodes a protein at least 1019 amino acids long and contains potential protein kinase C and casein kinase II phosphorylation sites and myristylation sites. SEQ ID NOs:27-29 are upregulated between four and six-fold. The occurrence of SEQ ID NO:28 primarily in hemic/immune libraries, 33% of which are derived from macrophages or monocytes, suggests that its function is immune-specific, and in particular, specific to the functions of macrophages and monocytes.

[0051] SEQ ID NOs:30-51 are cDNAs that are upregulated in DC and associated with endocytosis, antigen uptake and presentation, and proteolytic processing. SEQ ID NOs:30-32 are cDNAs upregulated about three to five-fold and encode sorting nexins 1-3, which belong to a family of hydrophilic molecules and are partially associated with the cellular membrane. In the immune system, 50% of sequences matching to SEQ ID NO:32 are found in cells of myeloid origin, including monocytes, dendritic cells, and macrophages. These molecules appear to play a role in intracellular trafficking of molecules to lysosomes where antigen is processed for presentation. SEQ ID NO:35 is upregulated six to nine-fold, and 88% of its expression is found in dendritic cells, macrophages, and the promonocytic cell line THP-1. SEQ ID NO:35 encodes a transmembrane receptor (TREM-1) that is similar to the polymeric immunoglobulin receptor which binds and endocytoses immunoglobulins. Like that receptor, TREM-1 is expressed on neutrophils and monocytes, upregulated upon LPS stimulation, and induces secretion of chemokines and cytokines such as MCP-1,TNF-α, and IL-8. Because of these similarities, TREM-1 appears to act as a receptor for antibody bound to antigen. In addition, TREM-1 associates with a transmembrane protein DAP12, SEQ ID NO:64.

[0052] Molecules other than clathrin that are important in endocytosis and vesicle transport are upregulated in dendritic cells, such as cDNAs that encode myoferlin and VAT1, SEQ ID NOs:38 and 39, respectively. Myoferlin is upregulated approximately three-fold, and within the immune system 44% of sequences are found in monocytes, macrophages, granulocytes, and dendritic cells. Myoferlin regulates membrane fusion which is important in endocytosis of antigen. VAT1 is upregulated approximately four-fold, is expressed ubiquitously, and appears to be important in vesicular transport of amines.

[0053] Several proteases other than cathepsins are upregulated in dendritic cells. Several different types of metalloproteinase cDNAs are upregulated; for example, SEQ ID NOs:36, 40, and 45 are upregulated about 14-fold, three-fold, and three-fold, respectively. Metalloproteinases regulate processing of antigen into peptides for presentation on MHC class I molecules, cleave membrane bound proteins, such as TRANCE, and affect migration and differentiation of dendritic cells. Metalloproteinases are sometimes secreted extracellularly for antigen processing. DC secrete proteases which can process antigen extracellularly into peptides which bind to empty MHC class II molecules on the surface of the cell. Metalloproteinases and other proteases are upregulated during the initial innate immune response as well, wherein proteins on surfaces of pathogens are crosslinked and/or degraded. Other proteases upregulated include SEQ ID NOs:41, 43, and 46-49, which encompass aspartic, cysteine, and other peptidases. SEQ ID NOs:50 and 51 encode angiotensin-converting enzyme, which was upregulated three to six-fold. Dendritic cells also express cathepsin inhibitors in the vesicles in which MHC class II proteins are being formed. SEQ ID NO:44 encodes a cysteine proteinase that inhibits cathepsins L, S, and K, and was originally described as a marker of squamous cell carcinoma. In addition, protease inhibitors prevent host cell degradation by proteases produced by pathogens themselves. SEQ ID NOs:42 and 44 inhibit proteases and appear to function in this manner.

[0054] SEQ ID NOs:52-59 are cDNAs that encode growth factors upregulated in dendritic cells. These factors include those that have been described in other immune functions such as SEQ ID NO:52, which encodes an IL-1 receptor antagonist; SEQ ID NO:57, which encodes an IL-1 receptor homolog preferentially expressed on Th2 cells; and SEQ ID NO:58, which encodes the a chain of the IL-13 receptor. Others not previously associated with immune function are epididymal secretory protein, SEQ ID NOs:53-55 and bone-derived growth factor, SEQ ID NO:59. All of these cDNAs are upregulated from three to nine-fold. Although its cDNA encodes an epididymal-specific protein, SEQ ID NO:53 is a splice variant that contains a region that is preferentially expressed in hemic/ immune libraries, 67% of which are of monocytic, dendritic, macrophage, or granulocytic in origin.

[0055] SEQ ID NOs:60-78 are cDNAs that encode proteins that are upregulated in DC and play a role in signal transduction. SEQ ID NO:61 encodes Notch, which is upregulated about 10-fold and is a receptor involved in growth and differentiation in a wide variety of cells including T lymphocytes. Both kinases and phosphatases are upregulated in dendritic cells; for example, B lymphocyte serine/threonine protein kinase, SEQ ID NO:71, which transduces signals from CD40 and is upregulated 30-fold, and a G-protein coupled receptor (GRK5), SEQ ID NO:72, which is upregulated 20-fold. SEQ ID NO:77 encodes doc-1, an S-phase regulator and tumor suppressor in oral cancer that may induce apoptosis. A related sequence, SEQ ID NO:78 encodes doc-2, another tumor suppressor phosphoprotein that contains a potential transmembrane sequence at amino acids 493 to 513. SEQ ID NO:64 is upregulated about four-fold in dendritic cells, and in the immune system 40% of its expression is found in dendritic cells and granulocytes. SEQ ID NO:64 encodes DAP12, a receptor that has homology to the CD3 zeta chain of the T cell receptor complex and may trigger maturation and activation of dendritic cells through antigen uptake by TREM-1.

[0056] SEQ ID NOs:79-98 are cDNAs that are upregulated in DC and encode molecules involved in DNA transcription. In particular, about 40% of upregulated sequences involved in DNA transcription encode zinc finger proteins. SEQ ID NO:90 is upregulated about 30-fold and encodes a zinc finger homeobox protein. SEQ ID NO:94 is upregulated from about three to about six-fold and encodes a breast cancer tumor suppressor gene, bcsc-1, which has two potential transmembrane regions at amino acids 224 to 242 and 370 to 389. Bcsc-1 has three potential glycosylation sites, 7 potential casein kinase II phosphorylation sites, 7 potential protein kinase C phosphorylation sites, and 4 potential myristylation sites.

[0057] SEQ ID NOs:99-143 are sequences upregulated in DC that encode molecules involved in a variety of pathways. SEQ ID NOs:99-101 encode proteins involved in iron metabolism. SEQ ID NOs:102 and 103 encode transmembrane proteins involved in lipid metabolism. SEQ ID NO:104, which encodes apolipoprotein E, is upregulated five to 19-fold. SEQ ID NOs:105 and 106, which encode apolipoprotein C-I, are upregulated three to five-fold and 38% of its immune tissue expression is found in monocytes, dendritic cells, macrophages, and granulocytes. Apolipoprotein E is secreted by macrophages to dispose of cholesterol and other lipids. During the innate immune response, lipoprotein components from pathogens are among the first antigens encountered by dendritic cells and macrophages. Scavenger receptors take up these lipoproteins, which are then processed for antigen presentation. Byproducts such as cholesterol and other lipids are then expelled through transporters, such as the ABCA1 transporter expressed on macrophages. Other cDNAs that encode proteins that export molecules detrimental to the host cell and that are upregulated in dendritic cells include the multidrug resistance associated protein 3, SEQ ID NO:132, which is upregulated four to five-fold. In the immune system, SEQ ID NO:132 has an abundance of 45% in macrophages and LPS-activated monocytes. A number of other cDNAs encoding transporters are upregulated three to five-fold in dendritic cells; these include SEQ ID NOs:133-138, which encode anion transporters, and SEQ ID NOs:140 and 142, which encode chloride channels. Other molecules that protect dendritic cells during immune response are SEQ ID NOs:120-128, which encode the vacuolar H+ATPase subunits which are upregulated three to 12-fold in dendritic cells. Recent studies have shown that ATPase is upregulated during the differentiation of monocytes into macrophages and can serve to downregulate production of inflammatory cytokines such as TNF-α and IL-1 thus preventing deleterious effects of these cytokines on the host. SEQ ID NOs:129 and 130 encode glutathione-S-transferase homolog and glutathione-S-transferase, respectively, proteins which protect cells from oxidative stress and toxic foreign chemicals produced by pathogens. Upregulation of SEQ ID NOs:129 and 130 in DC may prevent damage from production of pro-inflammatory cytokines.

[0058] A number of enzymes and other cytosolic and lysosomal proteins involved in lipid metabolism are upregulated and preferentially expressed in libraries made from monocytes, dendritic cells, macrophages, and granulocytes. These molecules include SEQ ID NOs:107, which encodes a lipoprotein lipase upregulated four to six-fold; and SEQ ID NOs:113-115, which encode fatty acid binding protein and fatty acid binding protein homolog and are upregulated 10 to 30-fold. More than 40% of the immune system expression of SEQ ID NO:116, which encodes lysosomal acid lipase, occurs in monocytes, dendritic cells, macrophages, and granulocytes. SEQ ID NO:118, which encodes palmitoyl-protein thioesterase, is upregulated four to five fold and exhibits 17% abundance in immune cells, 40% of which are monocytes, dendritic cells, macrophages, and granulocytes. These molecules, which metabolize lipids of pathogenic origin, appear to help in the process of remodeling the dendritic plasma membrane and membranes of other lysosomal and other endocytic compartments.

[0059] SEQ ID NOs:144-151 are cDNAs that encode surface or secreted proteins that have a role in adhesion. SEQ ID NOs:145 and 146 encode osteopontin which is upregulated 11 to 29-fold and 56% of immune system expression occurs in activated DC, macrophages, and THP-1 cells. Osteopontin binds to the cell adhesion molecule CD44 and is induced by GM-CSF. Another molecule that may be involved in cell to cell contact is SEQ ID NO:144 which encodes kerato-epithelin and is upregulated about 10-fold. SEQ ID NO:147 is upregulated more than five-fold, expressed most abundantly in dendritic cells, macrophages, and T cells, and encodes a 14 kD lectin which chemoattracts monocytes and macrophages. SEQ ID NO:148 is upregulated 14.4-fold and encodes a member of the claudin protein family which plays a role in adhesion of cells through tight junctions.

[0060] SEQ ID NOs:152-165 are cDNAs upregulated in DC that encode molecules involved in cellular structure. As monocytes mature into DC, profound morphological changes occur that allow increased mobility and the formation of dendritic projections. These changes result in an increased surface area, thereby enhancing uptake of antigen. cDNAs, which are upregulated in dendritic cells and affect structure, encode α tubulin (SEQ ID NOs:152 and 157); vimentin (SEQ ID NO:153); gamma-actin (SEQ ID NOs:155 and 156); and beta-actin (SEQ ID NO:163). EB1 (SEQ ID NO:165) is upregulated almost four-fold and associates with microtubulues and adenomatous polyposis coli (APC) protein, which shuttles beta-catenin from the cytosol to the nucleus. APC is important in signaling through Wnt, a soluble protein that influences cell adhesion, growth, and differentiation.

[0061] SEQ ID NOs:166-176 are cDNAs upregulated in DC that encode molecules which regulate the innate immune response. SEQ ID NO:171 encodes Toll-like receptor 1 (TLR-1), a member of the IL-1 receptor superfamily thought to transduce signals that upregulate costimulatory molecules and cytokines. Immune responses to LPS and bacteria require certain Toll receptors, although the role of TLR-1 has not previously been identified. In Drosophila, the putative Toll receptor ligand is the product of a protease cascade. Other cDNAs that may participate in the innate immune response include SEQ ID NOs:172, 174, 175, and 176, which encode α-2-macroglobulin, factor XIIIa, transglutaminase, and thrombomodulin, respectively. α-2-macroglobulin binds proteases, inhibiting their activity and preventing damage from pathogenic proteases. Transglutaminase and factor XIIIa may participate in the crosslinking of proteins present on pathogens, enhancing phagocytosis. Thrombomodulin is a receptor for thrombin, which has both pro- and anticoagulant activities.

[0062] SEQ ID NOs:177-182 are cDNAs that are upregulated in DC and expressed preferentially in the immune system. SEQ ID NO:177, which encodes a transmembrane protein, DORA, is upregulated 14.5-fold, and 50% of its expression occurs in DC, macrophages, and granulocytes. SEQ ID NO:178, which encodes a membrane-associated protein, is upregulated almost five-fold, and 18% of its expression occurs in the immune system. SEQ ID NO:179, which encodes CD52, a glycosylated protein associated with the membrane, is upregulated from about three to about four-fold, and 35% of its expression occurs in the immune system. SEQ ID NOs:180 and 181, which encode variants of the tetraspanin CD53, are upregulated three to 20-fold, and 30% of their immune system expression occurs in macrophages, activated monocytes, dendritic cells, and granulocytes. SEQ ID NO:182 which encodes PIL protein is upregulated about four-fold; transcript analysis indicates that PIL protein is expressed in both dendritic cells and T cells.

[0063] SEQ ID NOs:183-200 are cDNAs that are upregulated in DC and encode transmembrane proteins. In particular, SEQ ID NOs:186 and 187 are upregulated about six-fold and about three-fold, respectively, and encode proteins that have signal peptides at the N-terminus. SEQ ID NO:189 is upregulated about four-fold and encodes a protein whose expression is preferentially found in dendritic cells and macrophages. SEQ ID NO:196, which is upregulated about four-fold, encodes a protein that has seven predicted transmembrane regions, and 44% of transcripts in the immune system are found in monocytes, macrophages, dendritic cells and granulocytes.

[0064] SEQ ID NOs:201-215 are cDNAs that are upregulated in DC and encode homologs of proteins with known function. SEQ ID NOs:201 and 202 encode variants of HU-K4 which has similarity to a phospholipase-D protein from Vaccinia virus. SEQ ID NO:202 is preferentially expressed in dendritic cells, and SEQ ID NO:201 is preferentially expressed in monocytes, dendritic cells, macrophages, and granulocytes. Several cDNAs encode homologs of proteins involved in immune response. SEQ ID NOs:203 and 204 encode a molecule that has approximately 35% identity to the IL-17 receptor, and 16% of their transcripts are found in the immune system. SEQ ID NO:205 encodes a protein similar to murine ClqC chain, a component of the complement system. SEQ ID NO:211 encodes a protein similar to a murine zinc finger protein and is upregulated 22.7-fold. Some 19% of SEQ ID NO:211 transcripts are found in hemic/immune tissues, preferentially macrophages. SEQ ID NO:212 encodes a novel GATA zinc finger transcription factor, with 65% identity to the murine GATA-5 cardiac transcription factor.

[0065] SEQ ID NOs:215-225 are cDNAs that are upregulated in DC and encode homologs of proteins of unknown function that are upregulated three to five-fold. SEQ ID NO:216 encodes a protein that contains seven potential transmembrane regions. SEQ ID NO:218 encodes a protein with eight potential transmembrane regions, and SEQ ID NO:220 encodes a protein with one predicted transmembrane region. SEQ ID NO:221 encodes a protein that has 12 potential transmembrane regions and is expressed preferentially in monocytes, dendritic cells, macrophages, and granulocytes. In addition, over 14% of transcripts of SEQ ID NOs:219 and 223-225 occurs in immune tissues. Over 30% of transcripts of SEQ ID NOs:219 and 221-225 in the immune system occurs in monocytes, dendritic cells, macrophages, and granulocytes.

[0066] SEQ ID NOs:226-241 are unique cDNAs upregulated in DC from three to 16-fold and contain potential open reading frames. Of these, SEQ ID NOs:228, 229, 233, 237, and 238 have a specific abundance ranging from 14 to 30% in hemic and immune tissues, while SEQ ID NOs:227 and 228 have a specific abundance in the immune system of 36% and 41%, respectively, in monocytes, dendritic cells, macrophages, and granulocytes. SEQ ID NOs:226, 230, and 239 are expressed 15.9-fold, 13.3-fold, and 12.7-fold, respectively, in DC over that of monocytes.

[0067] Table 4 lists cDNAs that are upregulated by mature DC. Survival and function of DC may be enhanced by factors such as SEQ ID NOs:242 and 243, which are upregulated three-fold and encode variants of IL-1 beta, a cytokine involved in regulating Th1 type immune responses; SEQ ID NO:249 which is upregulated between eight and 12-fold and encodes IL-8; SEQ ID NOs:250 and 251, which are upregulated from about three to about five-fold and encode variants of small inducible cytokine A4, a chemokine similar to macrophage inflammatory protein-1 beta. Survival may also be enhanced by upregulation by three-fold of SEQ ID NO:253, which encodes an inhibitor of apoptosis protein, MIHC. SEQ ID NOs:244 and 245 encode CD9, a tetraspanin which is upregulated from about three to about five-fold and interacts with the integrin family and other membrane proteins. Upregulation of CD9 may enhance DC cell migration and adhesion. SEQ ID NO:248 encodes I-TRAF, which interacts with TRAF, a necessary component for transducing signals from the TRANCE receptor. In addition, two cDNAs are unique, SEQ ID NO:256 and SEQ ID NO:257, which are upregulated about four-fold and three-fold, respectively.

[0068] Table 5 lists cDNAs that are downregulated by mature DC. SEQ ID NO:258 encodes neurogranin, which has no known immune function. Although preferentially expressed in the nervous system, neurogranin is expressed in a number of immune tissues, including dendritic cells, eosinophils, B cells, T cells, and the promonocyte line THP-1. SEQ ID NOs:259 and 260 encode two unique proteins, each downregulated about three-fold, which are similar to a zinc finger protein and ribonucleoprotein, respectively.

[0069] The cDNAs of the invention define a differential expression pattern against which to compare the expression pattern of biopsied and/or in vitro treated dendritic cells. Experimentally, differential expression of the cDNAs can be evaluated by methods including, but not limited to, differential display by spatial immobilization or by gel electrophoresis, genome mismatch scanning, representational discriminant analysis, clustering, transcript imaging and array technologies. These methods may be used alone or in combination.

[0070] The combination may be arranged on a substrate and hybridized with dendritic cells from subjects with diagnosed disorders to identify those sequences which are differentially expressed in dendritic cells from normal subjects versus dendritic cells from diseased subjects. This allows identification of those sequences of highest diagnostic and potential therapeutic value. In one embodiment, an additional set of cDNAs, such as cDNAs encoding signaling molecules, are arranged on the substrate with the combination. Such combinations may be useful in the elucidation of pathways which are affected in a particular disorder or to identify new, coexpressed, candidate, therapeutic molecules.

[0071] In another embodiment, the combination can be used for large scale genetic or gene expression analysis of a large number of novel, nucleic acid molecules. These samples are prepared by methods well known in the art and are from mammalian cells or tissues which are in a certain stage of development; have been treated with a known molecule or compound, such as a cytokine, growth factor, a drug, and the like; or have been extracted or biopsied from a mammal with a known or unknown condition, disorder, or disease before or after treatment. The sample nucleic acid molecules are hybridized to the combination for the purpose of defining a novel gene profile associated with that developmental stage, treatment, or disorder.

[0072] cDNAs and Their Uses

[0073] cDNAs can be prepared by a variety of synthetic or enzymatic methods well known in the art. cDNAs can be synthesized, in whole or in part, using chemical methods well known in the art (Caruthers et al. (1980) Nucleic Acids Symp Ser (7)215-233). Alternatively, cDNAs can be produced enzymatically or recombinantly, by in vitro or in vivo transcription.

[0074] Nucleotide analogs can be incorporated into cDNAs by methods well known in the art. The only requirement is that the incorporated analog must base pair with native purines or pyrimidines. For example, 2,6-diaminopurine can substitute for adenine and form stronger bonds with thymidine than those between adenine and thymidine. A weaker pair is formed when hypoxanthine is substituted for guanine and base pairs with cytosine. Additionally, cDNAs can include nucleotides that have been derivatized chemically or enzymatically.

[0075] cDNAs can be synthesized on a substrate. Synthesis on the surface of a substrate may be accomplished using a chemical coupling procedure and a piezoelectric printing apparatus as described by Baldeschweiler et al. (PCT publication WO95/25 1116). Alternatively, the cDNAs can be synthesized on a substrate surface using a self-addressable electronic device that controls when reagents are added as described by Heller et al. (U.S. Pat. No. 5,605,662). cDNAs can be synthesized directly on a substrate by sequentially dispensing reagents for their synthesis on the substrate surface or by dispensing preformed DNA fragments to the substrate surface. Typical dispensers include a micropipette delivering solution to the substrate with a robotic system to control the position of the micropipette with respect to the substrate. There can be a multiplicity of dispensers so that reagents can be delivered to the reaction regions efficiently.

[0076] cDNAs can be immobilized on a substrate by covalent means such as by chemical bonding procedures or UV irradiation. In one method, a cDNA is bound to a glass surface which has been modified to contain epoxide or aldehyde groups. In another method, a cDNA is placed on a polylysine coated surface and UV cross-linked to it as described by Shalon et al. (WO95/35505). In yet another method, a cDNA is actively transported from a solution to a given position on a substrate by electrical means (Heller, supra). cDNAs do not have to be directly bound to the substrate, but rather can be bound to the substrate through a linker group. The linker groups are typically about 6 to 50 atoms long to provide exposure of the attached cDNA. Preferred linker groups include ethylene glycol oligomers, diamines, diacids and the like. Reactive groups on the substrate surface react with a terminal group of the linker to bind the linker to the substrate. The other terminus of the linker is then bound to the cDNA. Alternatively, polynucleotides, plasmids or cells can be arranged on a filter. In the latter case, cells are lysed, proteins and cellular components degraded, and the DNA is coupled to the filter by UV cross-linking.

[0077] The cDNAs may be used for a variety of purposes. For example, the combination of the invention may be used on an array. The array, in turn, can be used in high-throughput methods for detecting a related polynucleotide in a sample, screening a plurality of molecules or compounds to identify a ligand, diagnosing autoimmune disease or cancer, following a treatment of cancer with in vitro manipulated dendritic cells, following treatment of autoimmune disease with agents that suppress dendritic cell function, or inhibiting or inactivating a therapeutically relevant gene related to the cDNA.

[0078] When the cDNAs of the invention are employed on a microarray, the cDNAs are arranged in an ordered fashion so that each cDNA is present at a specified location. Because the cDNAs are at specified locations on the substrate, the hybridization patterns and intensities, which together create a unique expression profile, can be interpreted in terms of expression levels of particular genes and can be correlated with a particular metabolic process, condition, disorder, disease, stage of disease, or treatment.

[0079] Hybridization

[0080] The cDNAs or fragments or complements thereof may be used in various hybridization technologies. The cDNAs may be labeled using a variety of reporter molecules by either PCR, recombinant, or enzymatic techniques. For example, a commercially available vector containing the cDNA is transcribed in the presence of an appropriate polymerase, such as T7 or SP6 polymerase, and at least one labeled nucleotide. Commercial kits are available for labeling and cleanup of such cDNAs. Radioactive (Amersham Pharmacia Biotech (APB), Piscataway N.J.), fluorescent (Operon Technologies, Alameda Calif.), and chemiluminescent labeling (Promega, Madison Wis.) are well known in the art.

[0081] A cDNA may represent the complete coding region of an mRNA or be designed or derived from unique regions of the mRNA or genomic molecule, an intron, a 3′ untranslated region, or from a conserved motif. The cDNA is at least 18 contiguous nucleotides in length and is usually single stranded. Such a cDNA may be used under hybridization conditions that allow binding only to an identical sequence, a naturally occurring molecule encoding the same protein, or an allelic variant. Discovery of related human and mammalian sequences may also be accomplished using a pool of degenerate cDNAs and appropriate hybridization conditions. Generally, a cDNA for use in Southern or northern hybridizations may be from about 400 to about 6000 nucleotides long. Such cDNAs have high binding specificity in solution-based or substrate-based hybridizations. An oligonucleotide, a fragment of the cDNA, may be used to detect a polynucleotide in a sample using PCR.

[0082] The stringency of hybridization is determined by G+C content of the cDNA, salt concentration, and temperature. In particular, stringency is increased by reducing the concentration of salt or raising the hybridization temperature. In solutions used for some membrane based hybridizations, addition of an organic solvent such as formamide allows the reaction to occur at a lower temperature. Hybridization may be performed with buffers, such as 5×saline sodium citrate (SSC) with 1% sodium dodecyl sulfate (SDS) at 60° C., that permit the formation of a hybridization complex between nucleic acid sequences that contain some mismatches. Subsequent washes are performed with buffers such as 0.2×SSC with 0.1% SDS at either 45° C. (medium stringency) or 65°-68° C. (high stringency). At high stringency, hybridization complexes will remain stable only where the nucleic acid molecules are completely complementary. In some membrane-based hybridizations, preferably 35% or most preferably 50%, formamide may be added to the hybridization solution to reduce the temperature at which hybridization is performed. Background signals may be reduced by the use of detergents such as Sarkosyl or Triton X-100 (Sigma Aldrich, St. Louis Mo.) and a blocking agent such as denatured salmon sperm DNA. Selection of components and conditions for hybridization are well known to those skilled in the art and are reviewed in Ausubel et al. (1997, Short Protocols in Molecular Biology, John Wiley & Sons, New York N.Y., Units 2.8-2.11, 3.18-3.19 and 4.6-4.9).

[0083] Dot-blot, slot-blot, low density and high density arrays are prepared and analyzed using methods known in the art. cDNAs from about 18 consecutive nucleotides to about 5000 consecutive nucleotides in length are contemplated by the invention and used in array technologies. The preferred number of cDNAs on an array is at least about 100,000, a more preferred number is at least about 40,000, an even more preferred number is at least about 10,000, and a most preferred number is at least about 600 to about 800. The array may be used to monitor the expression level of large numbers of genes simultaneously and to identify genetic variants, mutations, and SNPs. Such information may be used to determine gene function; to understand the genetic basis of a disorder; to diagnose a disorder; and to develop and monitor the activities of therapeutic agents being used to control or cure a disorder. (See, e.g., U.S. Pat. No. 5,474,796; WO95/11995; WO95/35505; U.S. Pat. No. 5,605,662; and U.S. Pat. No. 5,958,342.)

[0084] Screening and Purification Assays

[0085] A cDNA may be used to screen a library or a plurality of molecules or compounds for a ligand which specifically binds the cDNA. Ligands may be DNA molecules, RNA molecules, peptide nucleic acid molecules, peptides, proteins such as transcription factors, promoters, enhancers, repressors, and other proteins that regulate replication, transcription, or translation of the polynucleotide in the biological system. The assay involves combining the cDNA or a fragment thereof with the molecules or compounds under conditions that allow specific binding and detecting the bound cDNA to identify at least one ligand that specifically binds the cDNA.

[0086] In one embodiment, the cDNA may be incubated with a library of isolated and purified molecules or compounds and binding activity determined by methods such as a gel-retardation assay (U.S. Pat. No. 6,010,849) or a reticulocyte lysate transcriptional assay. In another embodiment, the cDNA may be incubated with nuclear extracts from biopsied and/or cultured cells and tissues. Specific binding between the cDNA and a molecule or compound in the nuclear extract is initially determined by gel shift assay. Protein binding may be confirmed by raising antibodies against the protein and adding the antibodies to the gel-retardation assay where specific binding will cause a supershift in the assay.

[0087] In another embodiment, the cDNA may be used to purify a molecule or compound using affinity chromatography methods well known in the art. In one embodiment, the cDNA is chemically reacted with cyanogen bromide groups on a polymeric resin or gel. Then a sample is passed over and reacts with or binds to the cDNA. The molecule or compound which is bound to the cDNA may be released from the cDNA by increasing the salt concentration of the flow-through medium and collected.

[0088] The cDNA may be used to purify a ligand from a sample. A method for using a cDNA to purify a ligand would involve combining the cDNA or a fragment thereof with a sample under conditions to allow specific binding, recovering the bound cDNA, and using an appropriate agent to separate the cDNA from the purified ligand.

[0089] Protein Production and Uses

[0090] The full length cDNAs or fragment thereof may be used to produce purified proteins using recombinant DNA technologies described herein and taught in Ausubel et al. (supra; Units 16.1-16.62). One of the advantages of producing proteins by these procedures is the ability to obtain highly-enriched sources of the proteins thereby simplifying purification procedures.

[0091] The proteins may contain amino acid substitutions, deletions or insertions made on the basis of similarity in polarity, charge, solubility, hydrophobicity, hydrophilicity, and/or the amphipathic nature of the residues involved. Such substitutions may be conservative in nature when the substituted residue has structural or chemical properties similar to the original residue (e.g., replacement of leucine with isoleucine or valine) or they may be nonconservative when the replacement residue is radically different (e.g., a glycine replaced by a tryptophan). Computer programs included in LASERGENE software (DNASTAR, Madison Wis.), MACVECTOR software (Genetics Computer Group, Madison Wis.) and RasMol software (Roger Sayle, University of Massachusetts, Amherst Mass.) may be used to help determine which and how many amino acid residues in a particular portion of the protein may be substituted, inserted, or deleted without abolishing biological or immunological activity.

[0092] Expression of Encoded Proteins

[0093] Expression of a particular cDNA may be accomplished by cloning the cDNA into a vector and transforming this vector into a host cell. The cloning vector used for the construction of cDNA libraries in the LIFESEQ databases may also be used for expression. Such vectors usually contain a promoter and a polylinker useful for cloning, priming, and transcription. An exemplary vector may also contain the promoter for β-galactosidase, an amino-terminal methionine and the subsequent seven amino acid residues of β-galactosidase. The vector may be transformed into competent E. coli cells. Induction of the isolated bacterial strain with isopropylthiogalactoside (IPTG) using standard methods will produce a fusion protein that contains an N terminal methionine, the first seven residues of β-galactosidase, about residues of linker, and the protein encoded by the cDNA.

[0094] The cDNA may be shuttled into other vectors known to be useful for expression of protein in specific hosts. Oligonucleotides containing cloning sites and fragments of DNA sufficient to hybridize to stretches at both ends of the cDNA may be chemically synthesized by standard methods. These primers may then be used to amplify the desired fragments by PCR. The fragments may be digested with appropriate restriction enzymes under standard conditions and isolated using gel electrophoresis. Alternatively, similar fragments are produced by digestion of the cDNA with appropriate restriction enzymes and filled in with chemically synthesized oligonucleotides. Fragments of the coding sequence from more than one gene may be ligated together and expressed.

[0095] Signal sequences that dictate secretion of soluble proteins are particularly desirable as component parts of a recombinant sequence. For example, a chimeric protein may be expressed that includes one or more additional purification-facilitating domains. Such domains include, but are not limited to, metal-chelating domains that allow purification on immobilized metals, protein A domains that allow purification on immobilized immunoglobulin, and the domain utilized in the FLAGS extension/affinity purification system (Immunex, Seattle Wash.). The inclusion of a cleavable-linker sequence such as ENTEROKINASEMAX (Invitrogen, San Diego Calif.) between the protein and the purification domain may also be used to recover the protein.

[0096] Suitable host cells may include, but are not limited to, mammalian cells such as Chinese Hamster Ovary (CHO) and human 293 cells, insect cells such as Sf9 cells, plant cells such as Nicotiana tabacum, yeast cells such as Saccharomyces cerevisiae, and bacteria such as E. coli. For each of these cell systems, a useful vector may also include an origin of replication and one or two selectable markers to allow selection in bacteria as well as in a transformed eukaryotic host. Vectors for use in eukaryotic host cells may require the addition of 3′ poly(A) tail if the cDNA lacks poly(A).

[0097] Additionally, the vector may contain promoters or enhancers that increase gene expression. Many promoters are known and used in the art. Most promoters are host specific and exemplary promoters include SV40 promoters for CHO cells; T7 promoters for bacterial hosts; viral promoters and enhancers for plant cells; and PGH promoters for yeast. Adenoviral vectors with the rous sarcoma virus enhancer or retroviral vectors with long terminal repeat promoters may be used to drive protein expression in mammalian cell lines. Once homogeneous cultures of recombinant cells are obtained, large quantities of secreted soluble protein may be recovered from the conditioned medium and analyzed using chromatographic methods well known in the art. An alternative method for the production of large amounts of secreted protein involves the transformation of mammalian embryos and the recovery of the recombinant protein from milk produced by transgenic cows, goats, sheep, and the like.

[0098] In addition to recombinant production, proteins or portions thereof may be produced manually, using solid-phase techniques (Stewart et al. (1969) Solid-Phase Peptide Synthesis, W H Freeman, San Francisco Calif.; Merrifield (1963) J Am Chem Soc 5:2149-2154), or using machines such as the ABI 431A peptide synthesizer (Applied Biosystems, Foster City Calif.). Proteins produced by any of the above methods may be used as pharmaceutical compositions to treat disorders associated with null or inadequate expression of the genomic sequence.

[0099] Screening and Purification Assays

[0100] A protein or a portion thereof encoded by the cDNA may be used to screen a library or plurality of molecules or compounds for a ligand with specific binding affinity or to purify a molecule or compound from a sample. The protein or portion thereof employed in such screening may be free in solution, affixed to an abiotic or biotic substrate, or located intracellularly. For example, viable or fixed prokaryotic host cells that are stably transformed with recombinant nucleic acids that have expressed and positioned a protein on their cell surface can be used in screening assays. The cells are screened against a library or plurality of ligands and the specificity of binding or formation of complexes between the expressed protein and the ligand may be measured. The ligands may be DNA, RNA, or PNA molecules, agonists, antagonists, antibodies, immunoglobulins, inhibitors, peptides, pharmaceutical agents, proteins, drugs, or any other test molecule or compound that specifically binds the protein. An exemplary assay involves combining the mammalian protein or a portion thereof with the molecules or compounds under conditions that allow specific binding and detecting the bound protein to identify at least one ligand that specifically binds the protein.

[0101] This invention also contemplates the use of competitive drug screening assays in which neutralizing antibodies capable of binding the protein specifically compete with a test compound capable of binding to the protein, oligopeptide, or fragment thereof. One method for high throughput screening using very small assay volumes and very small amounts of test compound is described in U.S. Pat. No. 5,876,946. Molecules or compounds identified by screening may be used in a model system to evaluate their toxicity, diagnostic, or therapeutic potential.

[0102] Production of Antibodies

[0103] A protein encoded by a cDNA of the invention may be used to produce specific antibodies. Antibodies may be produced using an oligopeptide or a portion of the protein with inherent immunological activity. Methods for producing antibodies include: 1) injecting an animal, usually goats, rabbits, or mice, with the protein, or an antigenically-effective portion or an oligopeptide thereof, to induce an immune response; 2) engineering hybridomas to produce monoclonal antibodies; 3) inducing in vivo production in the lymphocyte population; or 4) screening libraries of recombinant immunoglobulins. Recombinant immunoglobulins may be produced as taught in U.S. Pat. No. 4,816,567.

[0104] Antibodies produced using the proteins of the invention are useful for the diagnosis of prepathologic disorders as well as the diagnosis of chronic or acute diseases characterized by abnormalities in the expression, amount, or distribution of the protein. A variety of protocols for competitive binding or immunoradiometric assays using either polyclonal or monoclonal antibodies specific for proteins are well known in the art. Immunoassays typically involve the formation of complexes between a protein and its specific binding molecule or compound and the measurement of complex formation. Immunoassays may employ a two-site, monoclonal-based assay that utilizes monoclonal antibodies reactive to two noninterfering epitopes on a specific protein or a competitive binding assay (Pound (1998) Immunochemical Protocols, Humana Press, Totowa N.J.).

[0105] Immunoassay procedures may be used to quantify expression of the protein in cell cultures, in subjects with a particular disorder or in model animal systems under various conditions. Increased or decreased production of proteins as monitored by immunoassay may contribute to knowledge of the cellular activities associated with developmental pathways, engineered conditions or diseases, or treatment efficacy. The quantity of a given protein in a given tissue may be determined by performing immunoassays on freeze-thawed detergent extracts of biological samples and comparing the slope of the binding curves to binding curves generated by purified protein.

[0106] Labeling of Molecules for Assay

[0107] A wide variety of reporter molecules and conjugation techniques are known by those skilled in the art and may be used in various cDNA, polynucleotide, protein, peptide or antibody assays. Synthesis of labeled molecules may be achieved using commercial kits for incorporation of a labeled nucleotide such as ³²P-dCTP, Cy3-dCTP or Cy5-dCTP or amino acid such as ³⁵S-methionine. Polynucleotides, cDNAs, proteins, or antibodies may be directly labeled with a reporter molecule by chemical conjugation to amines, thiols and other groups present in the molecules using reagents such as BIODIPY or FITC (Molecular Probes, Eugene Oreg.).

[0108] The proteins and antibodies may be labeled for purposes of assay by joining them, either covalently or noncovalently, with a reporter molecule that provides for a detectable signal. A wide variety of labels and conjugation techniques are known and have been reported in the scientific and patent literature including, but not limited to U.S. Pat. No. 3,817,837; 3,850,752; 3,939,350; 3,996,345; 4,277,437; 4,275,149; and 4,366,241.

[0109] Diagnostics

[0110] The cDNAs, or fragments thereof, may be used to detect and quantify differential gene expression; absence, presence, or excess expression of mRNAs; or to monitor mRNA levels during therapeutic intervention. Disorders associated with altered or differential expression include cancer, infectious disease, autoimmunity, allergy, and graft versus host disease. These cDNAs can also be utilized as markers of treatment efficacy against the disorders noted above and other disorders, conditions, and diseases over a period ranging from several days to months. The diagnostic assay may use hybridization or amplification technology to compare gene expression in a biological sample from a patient to standard samples in order to detect altered gene expression. Qualitative or quantitative methods for this comparison are well known in the art.

[0111] For example, the cDNA may be labeled by standard methods and added to a biological sample from a patient under conditions for hybridization complex formation. After an incubation period, the sample is washed and the amount of label (or signal) associated with hybridization complexes is quantified and compared with a standard value. If the amount of label in the patient sample is significantly altered in comparison to the standard value, then the presence of the associated condition, disease or disorder is indicated.

[0112] In order to provide a basis for the diagnosis of a condition, disease or disorder associated with gene expression, a normal or standard expression profile is established. This may be accomplished by combining a biological sample taken from normal subjects, either animal or human, with a probe under conditions for hybridization or amplification. Standard hybridization may be quantified by comparing the values obtained using normal subjects with values from an experiment in which a known amount of a substantially purified target sequence is used. Standard values obtained in this manner may be compared with values obtained from samples from patients who are symptomatic for a particular condition, disease, or disorder. Deviation from standard values toward those associated with a particular condition is used to diagnose that condition.

[0113] Such assays may also be used to evaluate the efficacy of a particular therapeutic treatment regimen in animal studies and in clinical trial or to monitor the treatment of an individual patient. Once the presence of a condition is established and a treatment protocol is initiated, diagnostic assays may be repeated on a regular basis to determine if the level of expression in the patient begins to approximate that which is observed in a normal subject. The results obtained from successive assays may be used to show the efficacy of treatment over a period ranging from several days to months.

[0114] Gene Expression Profiles

[0115] A gene expression profile comprises a plurality of cDNAs and a plurality of detectable hybridization complexes, wherein each complex is formed by hybridization of one or more probes to one or more complementary sequences in a sample. The cDNAs of the invention are used as elements on a microarray to analyze gene expression profiles. In one embodiment, the microarray is used to monitor the progression of disease. Researchers can assess and catalog the differences in gene expression between healthy and diseased tissues or cells. By analyzing changes in patterns of gene expression, disease can be diagnosed at earlier stages before the patient is symptomatic. The invention can be used to formulate a prognosis and to design a treatment regimen. The invention can also be used to monitor the efficacy of treatment. For treatments with known side effects, the microarray is employed to improve the treatment regimen. A dosage is established that causes a change in genetic expression patterns indicative of successful treatment. Expression patterns associated with the onset of undesirable side effects are avoided. This approach may be more sensitive and rapid than waiting for the patient to show inadequate improvement, or to manifest side effects, before altering the course of treatment.

[0116] In another embodiment, animal models which mimic a human disease can be used to characterize expression profiles associated with a particular condition, disorder or disease; or treatment of the condition, disorder or disease. Novel treatment regimens may be tested in these animal models using microarrays to establish and then follow expression profiles over time. In addition, microarrays may be used with cell cultures or tissues removed from animal models to rapidly screen large numbers of candidate drug molecules, looking for ones that produce an expression profile similar to those of known therapeutic drugs, with the expectation that molecules with the same expression profile will likely have similar therapeutic effects. Thus, the invention provides the means to rapidly determine the molecular mode of action of a drug.

[0117] Assays Using Antibodies

[0118] Antibodies directed against epitopes on a protein encoded by a cDNA of the invention may be used in assays to quantify the amount of protein found in a particular human cell. Such assays include methods utilizing the antibody and a label to detect expression level under normal or disease conditions. The antibodies may be used with or without modification, and labeled by joining them, either covalently or noncovalently, with a labeling moiety.

[0119] Protocols for detecting and measuring protein expression using either polyclonal or monoclonal antibodies are well known in the art. Examples include ELISA, RIA, and fluorescent activated cell sorting (FACS). Such immunoassays typically involve the formation of complexes between the protein and its specific antibody and the measurement of such complexes. These and other assays are described in Pound (supra). The method may employ a two-site, monoclonal-based immunoassay utilizing monoclonal antibodies reactive to two non-interfering epitopes, or a competitive binding assay. (See, e.g., Coligan et al. (1997) Current Protocols in Immunology, Wiley-Interscience, New York N.Y.; Pound, supra)

[0120] Therapeutics

[0121] The cDNAs and fragments thereof can be used in gene therapy. cDNAs can be delivered ex vivo to target cells, such as cells of bone marrow. Once stable integration and transcription and or translation are confirmed, the bone marrow may be reintroduced into the subject. Expression of the protein encoded by the cDNA may correct a disorder associated with mutation of a normal sequence, reduction or loss of an endogenous target protein, or overepression of an endogenous or mutant protein. Alternatively, cDNAs may be delivered in vivo using vectors such as retrovirus, adenovirus, adeno-associated virus, herpes simplex virus, and bacterial plasmids. Non-viral methods of gene delivery include cationic liposomes, polylysine conjugates, artificial viral envelopes, and direct injection of DNA (Anderson (1998) Nature 392:25-30; Dachs et al. (1997) Oncol Res 9:313-325; Chu et al. (1998) J Mol Med 76(34): 184-192; Weiss et al. (1999) Cell Mol Life Sci 55(3):334-358; Agrawal (1996) Antisense Therapeutics, Humana Press, Totowa N.J.; and August et al. (1997) Gene Therapy (Advances in Pharmacology, Vol. 40), Academic Press, San Diego Calif.).

[0122] In addition, expression of a particular protein can be regulated through the specific binding of a fragment of a cDNA to a genomic sequence or an mRNA which encodes the protein or directs its transcription or translation. The cDNA can be modified or derivatized to any RNA-like or DNA-like material including peptide nucleic acids, branched nucleic acids, and the like. These sequences can be produced biologically by transforming an appropriate host cell with a vector containing the sequence of interest.

[0123] Molecules which regulate the activity of the cDNA or encoded protein are useful as therapeutics for cancer, infectious disease, autoimmunity, allergy, and graft versus host disease and for enhancing vaccines. Such molecules include agonists which increase the expression or activity of the polynucleotide or encoded protein, respectively; or antagonists which decrease expression or activity of the polynucleotide or encoded protein, respectively. In one aspect, an antibody which specifically binds the protein may be used directly as an antagonist or indirectly as a delivery mechanism for bringing a pharmaceutical agent to cells or tissues which express the protein.

[0124] Additionally, any of the proteins, or their ligands, or complementary nucleic acid sequences may be administered as pharmaceutical compositions or in combination with other appropriate therapeutic agents. Selection of the appropriate agents for use in combination therapy may be made by one of ordinary skill in the art, according to conventional pharmaceutical principles. The combination of therapeutic agents may act synergistically to affect the treatment or prevention of the conditions and disorders associated with an immune response. Using this approach, one may be able to achieve therapeutic efficacy with lower dosages of each agent, thus reducing the potential for adverse side effects. Further, the therapeutic agents may be combined with pharmaceutically-acceptable carriers including excipients and auxiliaries which facilitate processing of the active compounds into preparations which can be used pharmaceutically. Further details on techniques for formulation and administration used by doctors and pharmacists may be found in the latest edition of Remington's Pharmaceutical Sciences (Mack Publishing, Easton Pa.).

[0125] Model Systems

[0126] Animal models may be used as bioassays where they exhibit a phenotypic response similar to that of humans and where exposure conditions are relevant to human exposures. Mammals are the most common models, and most infectious agent, cancer, drug, and toxicity studies are performed on rodents such as rats or mice because of low cost, availability, lifespan, reproductive potential, and abundant reference literature. Inbred and outbred rodent strains provide a convenient model for investigation of the physiological consequences of underexpression or overexpression of genes of interest and for the development of methods for diagnosis and treatment of diseases. A mammal inbred to overexpress a particular gene (for example, secreted in milk) may also serve as a convenient source of the protein expressed by that gene.

[0127] Transgenic Animal Models

[0128] Transgenic rodents that overexpress or underexpress a gene of interest may be inbred and used to model human diseases or to test therapeutic or toxic agents. (See, e.g., U.S. Pat. Nos. 5,175,383 and 5,767,337.) In some cases, the introduced gene may be activated at a specific time in a specific tissue type during fetal or postnatal development. Expression of the transgene is monitored by analysis of phenotype, of tissue-specific mRNA expression, or of serum and tissue protein levels in transgenic animals before, during, and after challenge with experimental drug therapies.

[0129] Embryonic Stem Cells

[0130] Embryonic (ES) stem cells isolated from rodent embryos retain the potential to form embryonic tissues. When ES cells such as the mouse 129/SvJ cell line are placed in a blastocyst from the C57BL/6 mouse strain, they resume normal development and contribute to tissues of the live-born animal. ES cells are preferred for use in the creation of experimental knockout and knockin animals. The method for this process is well known in the art and the steps are: the cDNA is introduced into a vector, the vector is transformed into ES cells, transformed cells are identified and microinjected into mouse cell blastocysts, blastocysts are surgically transferred to pseudopregnant dams. The resulting chimeric progeny are genotyped and bred to produce heterozygous or homozygous strains.

[0131] Knockout Analysis

[0132] In gene knockout analysis, a region of a gene is enzymatically modified to include a non-natural intervening sequence such as the neomycin phosphotransferase gene (neo; Capecchi (1989) Science 244:1288-1292). The modified gene is transformed into cultured ES cells and integrates into the endogenous genome by homologous recombination. The inserted sequence disrupts transcription and translation of the endogenous gene.

[0133] Knockin Analysis

[0134] ES cells can be used to create knockin humanized animals or transgenic animal models of human diseases. With knockin technology, a region of a human gene is injected into animal ES cells, and the human sequence integrates into the animal cell genome. Transgenic progeny or inbred lines are studied and treated with potential pharmaceutical agents to obtain information on the progression and treatment of the analogous human condition.

[0135] As described herein, the uses of the cDNAs, provided in the Sequence Listing of this application, and their encoded proteins are exemplary of known techniques and are not intended to reflect any limitation on their use in any technique that would be known to the person of average skill in the art. Furthermore, the cDNAs provided in this application may be used in molecular biology techniques that have not yet been developed, provided the new techniques rely on properties of nucleotide sequences that are currently known to the person of ordinary skill in the art, e.g., the triplet genetic code, specific base pair interactions, and the like. Likewise, reference to a method may include combining more than one method for obtaining or assembling full length cDNA sequences that will be known to those skilled in the art. It is also to be understood that this invention is not limited to the particular methodology, protocols, and reagents described, as these may vary. It is also understood that the terminology used herein is for the purpose of describing particular embodiments only, and is not intended to limit the scope of the present invention which will be limited only by the appended claims. The examples below are provided to illustrate the subject invention and are not included for the purpose of limiting the invention.

### EXAMPLES

### I Construction of cDNA Libraries

[0136] RNA was purchased from Clontech Laboratories (Palo Alto Calif.) or isolated from various tissues. Some tissues were homogenized and lysed in guanidinium isothiocyanate, while others were homogenized and lysed in phenol or in a suitable mixture of denaturants, such as TRIZOL reagent (Life Technologies, Rockville Md.). The resulting lysates were centrifuged over CsCl cushions or extracted with chloroform. RNA was precipitated with either isopropanol or ethanol and sodium acetate, or by other routine methods.

[0137] Phenol extraction and precipitation of RNA were repeated as necessary to increase RNA purity. In most cases, RNA was treated with DNAse. For most libraries, poly(A) RNA was isolated using oligo d(T)-coupled paramagnetic particles (Promega), OLIGOTEX latex particles (Qiagen, Valencia Calif.), or an OLIGOTEX mRNA purification kit (Qiagen). Alternatively, poly(A) RNA was isolated directly from tissue lysates using other kits, including the POLY(A)PURE mRNA purification kit (Ambion, Austin Tex.).

[0138] In some cases, Stratagene (La Jolla Calif.) was provided with RNA and constructed the corresponding cDNA libraries. Otherwise, cDNA was synthesized and cDNA libraries were constructed with the UNIZAP vector system (Stratagene) or SUPERSCRIPT plasmid system (Life Technologies) using the recommended procedures or similar methods known in the art. (See Ausubel, supra, Units 5.1 through 6.6.) Reverse transcription was initiated using oligo d(T) or random primers. Synthetic oligonucleotide adapters were ligated to double stranded cDNA, and the cDNA was digested with the appropriate restriction enzyme or enzymes. For most libraries, the cDNA was size-selected (300-1000 bp) using SEPHACRYL S1000, SEPHAROSE CL2B, or SEPHAROSE CL4B column chromatography (APB) or preparative agarose gel electrophoresis. cDNAs were ligated into compatible restriction enzyme sites of the polylinker of the pBLUESCRIPT phagemid (Stratagene), pSPORT1 plasmid (Life Technologies), or pinch plasmid (Incite Genomic, Palo Alto Calif.). Recombinant plasmids were transformed into XL1-BLUE, XL1-BLUEMRF, or SOLR competent E. coli cells (Stratagene) or DH5a, DH10B, or ELECTROMAX DH10B competent E. coli cells (Life Technologies).

[0139] In some cases, libraries were superinfected with a 5×excess of the helper phage, M13K07, according to the method of Vieira et al. (1987, Methods Enzymol 153:3-11) and normalized or subtracted using a methodology adapted from Soares (1994, Proc Natl Acad Sci 91:9228-9232), Swaroop et al. (1991, Nucl Acids Res 19:1954), and Bonaldo et al. (1996, Genome Res 6:791-806). The modified Soares normalization procedure was utilized to reduce the repetitive cloning of highly expressed high abundance cDNAs while maintaining the overall sequence complexity of the library. Modification included significantly longer hybridization times which allowed for increased gene discovery rates by biasing the normalized libraries toward those infrequently expressed low-abundance cDNAs which are poorly represented in a standard transcript image (Soares et al., supra).

[0140] II Isolation and Sequencing of cDNA Clones

[0141] Plasmids were recovered from host cells by in vivo excision using the UNIZAP vector system (Stratagene) or by cell lysis. Plasmids were purified using one of the following: the Magic or WIZARD MINIPREPS DNA purification system (Promega); the AGTC MINIPREP purification kit (Edge BioSystems, Gaithersburg Md.); the QIAWELL 8, QIAWELL 8 Plus, or QIAWELL 8 Ultra plasmid purification systems, or the REAL PREP 96 plasmid purification kit (QIAGEN). Following precipitation, plasmids were resuspended in 0.1 ml of distilled water and stored, with or without lyophilization, at 4° C.

[0142] Alternatively, plasmid DNA was amplified from host cell lysates using direct link PCR in a high-throughput format (Rao (1994) Anal Biochem 216:1-14). Host cell lysis and thermal cycling steps were carried out in a single reaction mixture. Samples were processed and stored in 384-well plates, and the concentration of amplified plasmid DNA was quantified fluorometrically using PICOGREEN dye (Molecular Probes) and a FLUOROSKAN II fluorescence scanner (Labsystems Oy, Helsinki, Finland).

[0143] cDNA sequencing reactions were processed using standard methods or high-throughput instrumentation such as the ABI CATALYST 800 thermal cycler (Applied Biosystems) or the DNA ENGINE thermal cycler (MJ Research, Watertown Mass.) in conjunction with the HYDRA microdispenser (Robbins Scientific, Sunnyvale Calif.) or the MICROLAB 2200 system (Hamilton, Reno Nev.). cDNA sequencing reactions were prepared using reagents provided by APB or supplied in ABI sequencing kits such as the ABI PRISM BIGDYE cycle sequencing kit (Applied Biosystems). Electrophoretic separation of cDNA sequencing reactions and detection of labeled cDNAs were carried out using the MEGABACE 1000 DNA sequencing system (APB); the ABI PRISM 373 or 377 sequencing systems (Applied Biosystems) in conjunction with standard ABI protocols and base calling software; or other sequence analysis systems known in the art. Reading frames within the cDNA sequences were identified using standard methods (reviewed in Ausubel, supra, Unit 7.7).

[0144] III Extension of cDNA Sequences

[0145] Nucleic acid sequences were extended using the cDNA clones and oligonucleotide primers. One primer was synthesized to initiate 5′ extension of the known fragment, and the other, to initiate 3′ extension of the known fragment. The initial primers were designed using OLIGO primer analysis software (Molecular Biology Insights, Cascade Colo.), or another appropriate program, to be about 22 to 30 nucleotides in length, to have a GC content of about 50% or more, and to anneal to the target sequence at temperatures of about 68° C. to about 72° C. Any stretch of nucleotides which would result in hairpin structures and primer-primer dimerizations was avoided.

[0146] Selected human cDNA libraries were used to extend the sequence. If more than one extension was necessary or desired, additional or nested sets of primers were designed. Preferred libraries are ones that have been size-selected to include larger cDNAs. Also, random primed libraries are preferred because they will contain more sequences with the 5′ and upstream regions of genes. A randomly primed library is particularly useful if an oligo d(T) library does not yield a full-length cDNA.

[0147] High fidelity amplification was obtained by PCR using methods well known in the art. PCR was performed in 96-well plates using the DNA ENGINE thermal cycler (MJ Research). The reaction mix contained DNA template, 200 nmol of each primer, reaction buffer containing Mg²⁺, (NH₄)₂SO₄, and β-mercaptoethanol, Taq DNA polymerase (APB), ELONGASE enzyme (Life Technologies), and Pfu DNA polymerase (Stratagene), with the following parameters for primer pair PCI A and PCI B (Incite Genomic): Step 1: 94° C., 3 min; Step 2: 94° C., 15 sec; Step 3: 60° C., 1 min; Step 4: 68° C., 2 min; Step 5: Steps 2, 3, and 4 repeated 20 times; Step 6: 68° C., 5 min; Step 7: storage at 4° C. In the alternative, the parameters for primer pair T7 and SK+ (Stratagene) were as follows: Step 1: 94° C., 3 min; Step 2: 94° C., 15 sec; Step 3: 57° C., 1 min; Step 4: 68° C., 2 min; Step 5: Steps 2, 3, and 4 repeated 20 times; Step 6: 68° C., 5 min; Step 7: storage at 4° C.

[0148] The concentration of DNA in each well was determined by dispensing 100 μl PICOGREEN reagent (0.25% reagent in 1×TE, v/v; Molecular Probes) and 0.5 μl of undiluted PCR product into each well of an opaque fluorimeter plate (Corning Costar, Acton Mass.) and allowing the DNA to bind to the reagent. The plate was scanned in a FLUOROSKAN II (Labsystems Oy) to measure the fluorescence of the sample and to quantify the concentration of DNA. A 5 μl to 10 μl aliquot of the reaction mixture was analyzed by electrophoresis on a 1% agarose mini-gel to determine which reactions were successful in extending the sequence.

[0149] The extended nucleic acids were desalted and concentrated, transferred to 384-well plates, digested with CviJI cholera virus endonuclease (Molecular Biology Research, Madison Wis.), and sonicated or sheared prior to religation into pUC18 vector (APB). For shotgun sequencing, the digested nucleic acids were separated on low concentration (0.6 to 0.8%) agarose gels, fragments were excised, and agar digested with AGARACE enzyme (Promega). Extended clones were religated using T4 DNA ligase (New England Biolabs, Beverly Mass.) into pUC18 vector (APB), treated with Pfu DNA polymerase (Stratagene) to fill-in restriction site overhangs, and transformed into competent E. coli cells. Transformed cells were selected on antibiotic-containing media, and individual colonies were picked and cultured overnight at 37° C. in 384-well plates in LB/2×carbenicillin liquid media.

[0150] The cells were lysed, and DNA was amplified by PCR using Taq DNA polymerase (APB) and Pfu DNA polymerase (Stratagene) with the following parameters: Step 1: 94° C., 3 min; Step 2: 94° C., 15 sec; Step 3: 60° C., 1 min; Step 4: 72° C., 2 min; Step 5: steps 2, 3, and 4 repeated 29 times; Step 6: 72° C., 5 min; Step 7: storage at 4° C. DNA was quantified using PICOGREEN reagent (Molecular Probes) as described above. Samples with low DNA recoveries were reamplified using the same conditions described above. Samples were diluted with 20% dimethylsulfoxide (DMSO; 1:2, v/v), and sequenced using DYENAMIC energy transfer sequencing primers and the DYENAMIC DIRECT cycle sequencing kit (APB) or the ABI PRISM BIGDYE terminator cycle sequencing kit (Applied Biosystems).

[0151] IV Assembly and Analysis of Sequences

[0152] Component nucleotide sequences from chromatograms were subjected to PHRED analysis (Phil Green, University of Washington, Seattle Wash.) and assigned a quality score. The sequences having at least a required quality score were subject to various pre-processing algorithms to eliminate low quality 3′ ends, vector and linker sequences, polyA tails, Alu repeats, mitochondrial and ribosomal sequences, bacterial contamination sequences, and sequences smaller than 50 base pairs. Sequences were screened using the BLOCK 2 program (Incite Genomic), a motif analysis program based on sequence information contained in the SWISS-PROT and PROSITE databases (Bairoch et al. (1997) Nucleic Acids Res 25:217-221; Attwood et al. (1997) J Chem Inf Comput Sci 37:417424).

[0153] Processed sequences were subjected to assembly procedures in which the sequences were assigned to bins, one sequence per bin. Sequences in each bin were assembled to produce consensus sequences, templates. Subsequent new sequences were added to existing bins using BLAST (Altschul (supra); Altschul et al. (supra); Karlin et al. (1988) Proc Natl Acad Sci 85:841-845), BLASTn (vers.1.4, WashU), and CROSSMATCH software (Phil Green, supra). Candidate pairs were identified as all BLAST hits having a quality score greater than or equal to 150. Alignments of at least 82% local identity were accepted into the bin. The component sequences from each bin were assembled using PHRAP (Phil Green, supra). Bins with several overlapping component sequences were assembled using DEEP PHRAP (Phil Green, supra).

[0154] Bins were compared against each other, and those having local similarity of at least 82% were combined and reassembled. Reassembled bins having templates of insufficient overlap (less than 95% local identity) were re-split. Assembled templates were also subjected to analysis by STITCHER/EXON MAPPER algorithms which analyzed the probabilities of the presence of splice variants, alternatively spliced exons, splice junctions, differential expression of alternative spliced genes across tissue types, disease states, and the like. These resulting bins were subjected to several rounds of the above assembly procedures to generate the template sequences found in the LIFESEQ GOLD database (Incite Genomic).

[0155] The assembled templates were annotated using the following procedure. Template sequences were analyzed using BLASTn (vers. 2.0, NCBI) versus GBpri (GenBank vers. 116). “Hits” are defined as an exact match having from 95% local identity over 200 base pairs through 100% local identity over 100 base pairs, or a homolog match having an E-value equal to or greater than 1×10⁻⁸. (The “E-value” quantifies the statistical probability that a match between two sequences occurred by chance). The hits were subjected to frameshift FASTx versus GENPEPT (GenBank version 109). In this analysis, a homolog match was defined as having an E-value of 1×10⁻⁸. The assembly method used above was described in U.S. Ser. No. 09/276,534, filed Mar. 25, 1999, and the LIFESEQ GOLD user manual (Incite Genomic).

[0156] Following assembly, template sequences were subjected to motif, BLAST, Hidden Markov Model (HMM; Pearson and Lipman (1988) Proc Natl Acad Sci 85:2444-2448; Smith and Waterman (1981) J Mol Biol 147:195-197), and functional analyses, and categorized in protein hierarchies using methods described in U.S. Ser. No. 08/812,290, filed Mar. 6, 1997; U.S. Ser. No. 08/947,845, filed Oct. 9, 1997; U.S. Pat. No. 5,953,727; and U.S. Ser. No. 09/034,807, filed Mar. 4, 1998. Template sequences may be further queried against public databases such as the GenBank rodent, mammalian, vertebrate, eukaryote, prokaryote, and human EST databases.

[0157] V Selection of Sequences, Microarray Preparation and Use

[0158] Incite clones represent template sequences derived from the LIFESEQ GOLD assembled human sequence database (Incite Genomic). In cases where more than one clone was available for a particular template, the 5′-most clone in the template was used on the microarray. The GENEALBUM GEM series 1-6 microarrays (Incite Genomic) contain 52,616 array elements which represent 17,472 annotated clusters and 35,144 unannotated clusters. The LIFEGEM 1.0 microarray (Incite Genomic) contains 9,203 array elements which represent 4,791 annotated genes and 1,861 unannotated clusters. For the UNIGEM series microarrays (Incite Genomic), Incite clones were mapped to non-redundant Unigene clusters (Unigene database (build 46), NCBI; Shuler (1997) J Mol Med 75:694-698), and the 5′ clone with the strongest BLAST alignment (at least 90% identity and 100 bp overlap) was chosen, verified, and used in the construction of the microarray. The UNIGEM V microarray (Incite Genomic) contains 9,182 array elements which represent 5,815 annotated genes and 2,699 unannotated clusters. UNIGEM V 2.0 microarray (Incite Genomic) contains 7075 array elements which represent 4610 annotated genes and 2,184 unannotated clusters. The HUMAN GENOME GEM series 1 microarray (Incite Genomic) contains 9,766 array elements which represent 7,612 annotated clusters and 1,382 unannotated clusters. Tables 2-5 show the GenBank annotations for SEQ ID NOs:1-260 of this invention as produced by BLAST analysis. LIFEGEM 1.0, GENEALBUM 1-6, and UNIGEM V microarrays were used to compare cDNA expression between monocytes and immature DC. LIFEGEM 1.0, UNIGEM V 2.0, and HUMAN GENOME GEM 1 were used to compare cDNA expression between mature DC and TRANCE-treated mature DC.

[0159] To construct microarrays, cDNAs were amplified from bacterial cells using primers complementary to vector sequences flanking the cDNA insert. Thirty cycles of PCR increased the initial quantity of cDNAs from 1-2 ng to a final quantity greater than 5 μg. Amplified cDNAs were then purified using SEPHACRYL-400 columns (APB). Purified cDNAs were immobilized on polymer-coated glass slides. Glass microscope slides (Corning, Corning N.Y.) were cleaned by ultrasound in 0.1% SDS and acetone, with extensive distilled water washes between and after treatments. Glass slides were etched in 4% hydrofluoric acid (VWR Scientific Products, West Chester Pa.), washed thoroughly in distilled water, and coated with 0.05% aminopropyl silane (Sigma Aldrich) in 95% ethanol. Coated slides were cured in a 110° C. oven. cDNAs were applied to the coated glass substrate using a procedure described in U.S. Pat. No. 5,807,522. One microliter of the cDNA at an average concentration of 100 ng/ul was loaded into the open capillary printing element by a high-speed robotic apparatus which then deposited about 5 nl of cDNA per slide.

[0160] Microarrays were UV-crosslinked using a STRATALINKER UV-crosslinker (Stratagene), and then washed at room temperature once in 0.2% SDS and three times in distilled water. Non-specific binding sites were blocked by incubation of microarrays in 0.2% casein in phosphate buffered saline (Tropix, Bedford Mass.) for 30 minutes at 60° C. followed by washes in 0.2% SDS and distilled water as before.

[0161] VI Preparation of Samples

[0162] Preparation of Monocytes and Immature Dendritic Cells

[0163] Peripheral blood mononuclear cells (PBMCs) were isolated from freshly obtained peripheral blood of four healthy donors by centrifugation of the lymphocyte enriched blood fraction over a HYPAQUE ficoll gradient (Sigma-Aldrich). The PBMCs were allowed to adhere to plastic in Iscove's Modified Dulbecco's Medium supplemented with 10% fetal bovine serum, 200 nM glutamine, and 200 nM each penicillin and streptomycin for 4 hours to separate monocytes from other nonadherent cells. One-half of the monocytes was cultured for seven days in 10 ng/ml GM-CSF (Peprotech, Rocky Hill N.J.), and the other half was cultured for seven days with 10 ng/ml GM-CSF and 10 ng/ml IL-4 (Peprotech) to produce immature dendritic cells.

[0164] Preparation of Mature Dendritic Cells

[0165] Monocytes were isolated as described above and were incubated with 10 ng/ml GM-CSF and 10 ng/ml IL-4 for 13 days to generate immature DC. The DC were activated with anti-CD40 (Biodesign International, Kennebunk Me.) at 10 ng/ml for 24 hours. The DC were divided into half, and each half further divided into thirds. Each third was cultured with soluble human TRANCE protein (Peprotech Inc.) at 10 ng/ml for 2, 8, and 24 hours, respectively, or cultured without TRANCE for 2, 8, and 24 hours, respectively.

[0166] Isolation and Labeling of Sample cDNAs

[0167] Cells were harvested and lysed in 1 ml of TRIZOL reagent (5×10⁶ cells/ml; Life Technologies). The lysates were vortexed thoroughly, incubated at room temperature for 2-3 minutes, and extracted with 0.5 ml chloroform. The extract was mixed, incubated at room temperature for 5 minutes, and centrifuged at 16,000 g for 15 minutes at 4° C. The aqueous layer was collected and an equal volume of isopropanol was added. Samples were mixed, incubated at room temperature for 10 minutes, and centrifuged at 16,000 g for 20 minutes at 4° C. The supernatant was removed and the RNA pellet was washed with 1 ml of 70% ethanol, centrifuged at 16,000 g at 4° C., and resuspended in RNAse-free water. The concentration of the RNA was determined by measuring the optical density at 260 nm.

[0168] Poly(A) RNA was prepared using an OLIGOTEX mRNA kit (QIAGEN) with the following modifications: OLIGOTEX beads were washed in tubes instead of on spin columns, resuspended in elution buffer, and then loaded onto spin columns to recover mRNA. To obtain maximum yield, the mRNA was eluted twice.

[0169] Each poly(A) RNA sample was reverse transcribed using MMLV reverse-transcriptase, 0.05 pg/μl oligo-d(T) primer (21mer), 1×first strand buffer, 0.03 units/ul RNase inhibitor, 500 uM dATP, 500 uM dGTP, 500 uM dTTP, 40 uM dCTP, and 40 uM either dCTP-Cy3 or dCTP-Cy5 (APB). The reverse transcription reaction was performed in a 25 ml volume containing 200 ng poly(A) RNA using the GEMBRIGHT kit (Incite Genomic). Specific control poly(A) RNAs (YCFRO6, YCFR45, YCFR67, YCFR85, YCFR43, YCFR22, YCFR23, YCFR25, YCFR44, YCFR26) were synthesized by in vitro transcription from non-coding yeast genomic DNA (W. Lei, unpublished). As quantitative controls, control mRNAs (YCFRO6, YCFR45, YCFR67, and YCFR85) at 0.002 ng, 0.02 ng, 0.2 ng, and 2 ng were diluted into reverse transcription reaction at ratios of 1:100,000, 1:10,000, 1:1000, 1:100 (w/w) to sample mRNA, respectively. To sample differential expression patterns, control mRNAs (YCFR43, YCFR22, YCFR23, YCFR25, YCFR44, YCFR26) were diluted into reverse transcription reaction at ratios of 1:3, 3:1, 1:10, 10:1, 1:25, 25:1 (w/w) to sample mRNA. Reactions were incubated at 37° C. for 2 hr, treated with 2.5 ml of 0.5M sodium hydroxide, and incubated for 20 minutes at 85° C. to the stop the reaction and degrade the RNA.

[0170] cDNAs were purified using two successive CHROMA SPIN 30 gel filtration spin columns (Clontech). Cy3- and Cy5-labeled reaction samples were combined as described below and ethanol precipitated using 1 ml of glycogen (1 mg/ml), 60 ml sodium acetate, and 300 ml of 100% ethanol. The cDNAs were then dried to completion using a SpeedVAC system (Savant Instruments, Holbrook N.Y.) and resuspended in 14 μl 5×SSC/0.2% SDS.

[0171] VII Hybridization and Detection

[0172] Hybridization reactions contained 9 μl of sample mixture containing 0.2 μg each of Cy3 and CyS labeled cDNA synthesis products in 5×SSC, 0.2% SDS hybridization buffer. The mixture was heated to 65° C. for 5 minutes and was aliquoted onto the microarray surface and covered with an 1.8 cm² coverslip. The microarrays were transferred to a waterproof chamber having a cavity just slightly larger than a microscope slide. The chamber was kept at 100% humidity internally by the addition of 140 μl of 5×SSC in a corner of the chamber. The chamber containing the microarrays was incubated for about 6.5 hours at 60° C. The microarrays were washed for 10 min at 45° C. in low stringency wash buffer (1×SSC, 0.1% SDS), three times for 10 minutes each at 45° C. in high stringency wash buffer (0.1×SSC), and dried.

[0173] Reporter-labeled hybridization complexes were detected with a microscope equipped with an Innova 70 mixed gas 10 W laser (Coherent, Santa Clara Calif.) capable of generating spectral lines at 488 nm for excitation of Cy3 and at 632 nm for excitation of Cy5. The excitation laser light was focused on the microarray using a 20× microscope objective (Nikon, Melville N.Y.). The slide containing the microarray was placed on a computer-controlled X-Y stage on the microscope and raster-scanned past the objective. The 1.8 cm×1.8 cm microarray used in the present example was scanned with a resolution of 20 micrometers.

[0174] In two separate scans, the mixed gas multiline laser excited the two fluorophores sequentially. Emitted light was split, based on wavelength, into two photomultiplier tube detectors (PMT R1477; Hamamatsu Photonics Systems, Bridgewater N.J.) corresponding to the two fluorophores. Appropriate filters positioned between the microarray and the photomultiplier tubes were used to filter the signals. The emission maxima of the fluorophores used were 565 nm for Cy3 and 650 nm for CyS. Each microarray was typically scanned twice, one scan per fluorophore using the appropriate filters at the laser source, although the apparatus was capable of recording the spectra from both fluorophores simultaneously.

[0175] The sensitivity of the scans was calibrated using the signal intensity generated by a cDNA control species. Samples of the calibrating cDNA were separately labeled with the two fluorophores and identical amounts of each were added to the hybridization mixture. A specific location on the microarray contained a complementary DNA sequence, allowing the intensity of the signal at that location to be correlated with a weight ratio of hybridizing species of 1:100,000.

[0176] The output of the photomultiplier tube was digitized using a 12-bit RTI-835H analog-to-digital (A/D) conversion board (Analog Devices, Norwood, Mass.) installed in an IBM-compatible PC computer. The digitized data were displayed as an image where the signal intensity was mapped using a linear 20-color transformation to a pseudocolor scale ranging from blue (low signal) to red (high signal). The data was also analyzed quantitatively. Where two different fluorophores were excited and measured simultaneously, the data were first corrected for optical crosstalk (due to overlapping emission spectra) between the fluorophores using each fluorophore's emission spectrum.

[0177] A grid was superimposed over the fluorescence signal image such that the signal from each spot was centered in each element of the grid. The fluorescence signal within each element was then integrated to obtain a numerical value corresponding to the average intensity of the signal. The software used for signal analysis was the GEMTOOLS gene expression analysis program (Incite Genomic). Significance was defined as signal to background ratio exceeding 2×and area hybridization exceeding 40%.

[0178] VIII Data Analysis and Results

[0179] Array elements that exhibited at least a 2.5-fold change in expression at one or more time points, a signal intensity over 250 units, a signal-to-background ratio of at least 2.5, and an element spot size of at least 40% were identified as differentially expressed using the GEMTOOLS program (Incite Genomic). Differential expression is reported as the balanced differential expression value for each clone representing a gene on the microarray. The cDNAs that are differentially expressed are shown in Tables 2-5. Table 2 identifies downregulated cDNAs in immature DC. Table 3 identifies upregulated cDNAs in immature DC. Tables 4 and 5 identify cDNAs upregulated or downregulated, respectively, in mature DC. The cDNAs are identified by their SEQ ID NO and TEMPLATE ID, and by the description associated with at least a fragment of a polynucleotide found in GenBank. The descriptions were obtained using the sequences of the Sequence Listing and BLAST analysis.

[0180] IX Other Hybridization Technologies and Analyses

[0181] Other hybridization technologies utilize a variety of substrates such as nylon membranes, capillary tubes, etc. Arranging cDNAs on polymer coated slides is described in Example V; sample cDNA preparation and hybridization and analysis using polymer coated slides is described in examples VI and VII, respectively.

[0182] The cDNAs are applied to a membrane substrate by one of the following methods. A mixture of cDNAs is fractionated by gel electrophoresis and transferred to a nylon membrane by capillary transfer. Alternatively, the cDNAs are individually ligated to a vector and inserted into bacterial host cells to form a library. The cDNAs are then arranged on a substrate by one of the following methods. In the first method, bacterial cells containing individual clones are robotically picked and arranged on a nylon membrane. The membrane is placed on LB agar containing selective agent (carbenicillin, kanamycin, ampicillin, or chloramphenicol depending on the vector used) and incubated at 37° C. for 16 hr. The membrane is removed from the agar and consecutively placed colony side up in 10% SDS, denaturing solution (1.5 M NaCl, 0.5 M NaOH), neutralizing solution (1.5 M NaCl, 1 M Tris, pH 8.0), and twice in 2×SSC for 10 min each. The membrane is then UV irradiated in a STRATALINKER UV-crosslinker (Stratagene).

[0183] In the second method, cDNAs are amplified from bacterial vectors by thirty cycles of PCR using primers complementary to vector sequences flanking the insert. PCR amplification increases a starting concentration of 1-2 ng nucleic acid to a final quantity greater than 5 μg. Amplified nucleic acids from about 400 bp to about 5000 bp in length are purified using SEPHACRYL-400 beads (APB). Purified nucleic acids are arranged on a nylon membrane manually or using a dot/slot blotting manifold and suction device and are immobilized by denaturation, neutralization, and UV irradiation as described above.

[0184] Hybridization probes derived from cDNAs of the Sequence Listing are employed for screening cDNAs, mRNAs, or genomic DNA in membrane-based hybridizations. Probes are prepared by diluting the cDNAs to a concentration of 40-50 ng in 45 μl TE buffer, denaturing by heating to 100° C. for five min and briefly centrifuging. The denatured cDNA is then added to a REDIPRIME tube (APB), gently mixed until blue color is evenly distributed, and briefly centrifuged. Five microliters of [³²P]dCTP is added to the tube, and the contents are incubated at 37° C. for 10 min. The labeling reaction is stopped by adding 5 μl of 0.2M EDTA, and probe is purified from unincorporated nucleotides using a PROBEQUANT G-50 microcolumn (APB). The purified probe is heated to 100° C. for five min and then snap cooled for two min on ice.

[0185] Membranes are pre-hybridized in hybridization solution containing 1% Sarkosyl and 1×high phosphate buffer (0.5 M NaCl, 0.1 M Na₂HPO₄, 5 mM EDTA, pH 7) at 55° C. for two hr. The probe, diluted in 15 ml fresh hybridization solution, is then added to the membrane. The membrane is hybridized with the probe at 55° C. for 16 hr. Following hybridization, the membrane is washed for 15 min at 25° C. in 1 mM Tris (pH 8.0), 1% Sarkosyl, and four times for 15 min each at 25° C. in 1 mM Tris (pH 8.0). To detect hybridization complexes, XOMAT-AR film (Eastman Kodak, Rochester N.Y.) is exposed to the membrane overnight at −70° C., developed, and examined.

[0186] X Further Characterization of Differentially Expressed cDNAs and Proteins

[0187] Clones were blasted against the LIFESEQ Gold 5.1 database (Incite Genomic) and an Incite template and its sequence variants were chosen for each clone. The template and variant sequences were blasted against GenBank database to acquire annotation. The nucleotide sequences were translated into amino acid sequence which was blasted against the GenPept and other protein databases to acquire annotation and characterization, i.e., structural motifs.

[0188] Percent sequence identity can be determined electronically for two or more amino acid or nucleic acid sequences using the MEGALIGN program (DNASTAR). The percent identity between two amino acid sequences is calculated by dividing the length of sequence A, minus the number of gap residues in sequence A, minus the number of gap residues in sequence B, into the sum of the residue matches between sequence A and sequence B, times one hundred. Gaps of low or of no homology between the two amino acid sequences are not included in determining percentage identity.

[0189] Sequences with conserved protein motifs may be searched using the BLOCKS search program. This program analyses sequence information contained in the Swiss-Prot and PROSITE databases and is useful for determining the classification of uncharacterized proteins translated from genomic or cDNA sequences (Bairoch et al.(supra); Attwood et al. (supra). PROSITE database is a useful source for identifying functional or structural domains that are not detected using motifs due to extreme sequence divergence. Using weight matrices, these domains are calibrated against the SWISS-PROT database to obtain a measure of the chance distribution of the matches.

[0190] The PRINTS database can be searched using the BLIMPS search program to obtain protein family “fingerprints”. The PRINTS database complements the PROSITE database by exploiting groups of conserved motifs within sequence alignments to build characteristic signatures of different protein families. For both BLOCKS and PRINTS analyses, the cutoff scores for local similarity were: >1300=strong, 1000-1300=suggestive; for global similarity were: p<exp-3; and for strength (degree of correlation) were: >1300=strong, 1000-1300=weak.

[0191] XI Expression of the Encoded Protein

[0192] Expression and purification of a protein encoded by a cDNA of the invention is achieved using bacterial or virus-based expression systems. For expression in bacteria, cDNA is subcloned into a vector containing an antibiotic resistance gene and an inducible promoter that directs high levels of cDNA transcription. Examples of such promoters include, but are not limited to, the trp-lac (tac) hybrid promoter and the T5 or T7 bacteriophage promoter in conjunction with the lac operator regulatory element. Recombinant vectors are transformed into bacterial hosts, such as BL21(DE3). Antibiotic resistant bacteria express the protein upon induction with IPTG. Expression in eukaryotic cells is achieved by infecting Spodoptera frugiperda (Sf9) insect cells with recombinant baculovirus, Autographica californica nuclear polyhedrosis virus. The polyhedrin gene of baculovirus is replaced with the cDNA by either homologous recombination or bacterial-mediated transposition involving transfer plasmid intermediates. Viral infectivity is maintained and the strong polyhedrin promoter drives high levels of transcription.

[0193] For ease of purification, the protein is synthesized as a fusion protein with glutathione-S-transferase (GST; APB) or a similar alternative such as FLAG. The fusion protein is purified on immobilized glutathione under conditions that maintain protein activity and antigenicity. After purification, the GST moiety is proteolytically cleaved from the protein with thrombin. A fusion protein with FLAG, an 8-amino acid peptide, is purified using commercially available monoclonal and polyclonal anti-FLAG antibodies (Eastman Kodak, Rochester N.Y.).

[0194] XII Production of Specific Antibodies

[0195] A denatured protein from a reverse phase HPLC separation is obtained in quantities up to 75 mg. This denatured protein is used to immunize mice or rabbits following standard protocols. About 100 μg is used to immunize a mouse, while up to 1 mg is used to immunize a rabbit. The denatured protein is radioiodinated and incubated with murine B-cell hybridomas to screen for monoclonal antibodies. About 20 mg of protein is sufficient for labeling and screening several thousand clones.

[0196] In another approach, the amino acid sequence translated from a cDNA of the invention is analyzed using PROTEAN software (DNASTAR) to determine regions of high antigenicity, essentially antigenically-effective epitopes of the protein. The optimal sequences for immunization are usually at the C-terminus, the N-terminus, and those intervening, hydrophilic regions of the protein that are likely to be exposed to the external environment when the protein is in its natural conformation. Typically, oligopeptides about 15 residues in length are synthesized using an ABI 431 peptide synthesizer (Applied Biosystems) using Fmoc-chemistry and then coupled to keyhole limpet hemocyanin (KLH; Sigma Aldrich) by reaction with M-maleimidobenzoyl-N-hydroxysuccinimide ester. If necessary, a cysteine may be introduced at the N-terminus of the peptide to permit coupling to KLH. Rabbits are immunized with the oligopeptide-KLH complex in complete Freund's adjuvant. The resulting antisera are tested for antipeptide activity by binding the peptide to plastic, blocking with 1% BSA, reacting with rabbit antisera, washing, and reacting with radioiodinated goat anti-rabbit IgG.

[0197] Hybridomas are prepared and screened using standard techniques. Hybridomas of interest are detected by screening with radioiodinated protein to identify those fusions producing a monoclonal antibody specific for the protein. In a typical protocol, wells of 96 well plates (FAST, Becton-Dickinson, Palo Alto Calif.) are coated with affinity-purified, specific rabbit-anti-mouse (or suitable anti-species Ig) antibodies at 10 mg/ml. The coated wells are blocked with 1% BSA and washed and exposed to supernatants from hybridomas. After incubation, the wells are exposed to radiolabeled protein at 1 mg/ml. Clones producing antibodies bind a quantity of labeled protein that is detectable above background.

[0198] Such clones are expanded and subjected to 2 cycles of cloning at I cell/3 wells. Cloned hybridomas are injected into pristane-treated mice to produce ascites, and monoclonal antibody is purified from the ascitic fluid by affinity chromatography on protein A (APB). Monoclonal antibodies with affinities of at least 10⁸ M⁻¹, preferably 10⁹ to 10¹⁰ M⁻¹ or stronger, are made by procedures well known in the art.

[0199] XIII Purification of Naturally Occurring Protein Using Specific Antibodies

[0200] Naturally occurring or recombinant protein is substantially purified by immunoaffinity chromatography using antibodies specific for the protein. An immunoaffinity column is constructed by covalently coupling the antibody to CNBr-activated SEPHAROSE resin (APB). Media containing the protein is passed over the immunoaffinity column, and the column is washed using high ionic strength buffers in the presence of detergent to allow preferential absorbance of the protein. After coupling, the protein is eluted from the column using a buffer of pH 2-3 or a high concentration of urea or thiocyanate ion to disrupt antibody/protein binding, and the protein is collected.

[0201] XIV Screening Molecules for Specific Binding with the cDNA or Protein

[0202] The cDNA or fragments thereof and the protein or portions thereof are labeled with ³²P-dCTP, Cy3-dCTP, Cy5-dCTP (APB), or BIODIPY or FITC (Molecular Probes), respectively. Candidate molecules or compounds previously arranged on a substrate are incubated in the presence of labeled nucleic or amino acid. After incubation under conditions for either a cDNA or a protein, the substrate is washed, and any position on the substrate retaining label, which indicates specific binding or complex formation, is assayed. The binding molecule is identified by its arrayed position on the substrate. Data obtained using different concentrations of the nucleic acid or protein are used to calculate affinity between the labeled nucleic acid or protein and the bound molecule. High throughput screening using very small assay volumes and very small amounts of test compound is fully described in Burbaum et al. U.S. Pat. No. 5,876,946.

[0203] All patents and publications mentioned in the specification are incorporated herein by reference. Various modifications and variations of the described method and system of the invention will be apparent to those skilled in the art without departing from the scope and spirit of the invention. Although the invention has been described in connection with specific preferred embodiments, it should be understood that the invention as claimed should not be unduly limited to such specific embodiments. Indeed, various modifications of the described modes for carrying out the invention that are obvious to those skilled in the field of molecular biology or related fields are intended to be within the scope of the following claims.

TABLE 1

| GENBANK ID | DESCRIPTION | BDE |
|---|---|---|
| g1006656 | H. sapiens mRNA for cathepsin C. | 19.3, 17.0, 16.7, 17.1, 14.3 |
| g1262337 | H. sapiens MB1 gene. | 3.9, 6.7 |
| g1280140 | Human eotaxin precursor mRNA, complete cds. | 5.2, 22.6, 6.2, 4.5, 4.4 |
| g1373145 | Human clathrin assembly protein lymphoid myeloid leukemia | 3.7 |
| g1434908 | Homo sapiens MHC (HLA) DRB intron 1 DNA, partial sequence. | 3.4 |
| g1536878 | Human mRNA for chemokine, complete cds. | 5.7, 3.8, 5.3 |
| g178535 | CD13; Human aminopeptidase N | 3.9 |
| g179338 | Human HLA-B-associated transcript 2 (BAT2) mRNA, complete | 6.1 |
| g179640 | Human complement C1q B-chain gene, exon A + 1. | 15.2, 11.1, 8.8, 16.9, 5.3 |
| g180055 | Human thymocyte antigen CD1b mRNA, complete cds. | 5.3, 3.1, 3.2 |
| g180112 | Human antigen CD36 (clone 21) mRNA | 3.3 |
| g180149 | Human transmembrane protein (CD59) gene, exon 4. | 12.9 |
| g180154 | Human lysosomal membrane glycoprotein CD63 mRNA. | 4.0, 10.4 |
| g181179 | Human cathepsin D mRNA, complete cds. | 6.7, 4.6, 9.6 |
| g182489 | Human Fc-epsilon-receptor gamma-chain gene, complete cds. | 4.7, 4.2, 3.6 |
| g182598 | Human IgG low affinity Fc fragment receptor (FcRIIb3) mRNA, | 4.2 |
| g183089 | Human low-affinity Fc-receptor IIB gene, exons 4-7. | 3.1 |
| g184422 | Human 90 kD heat shock protein gene, complete cds. | 5.2 |
| g184851 | Human low affinity IgG receptor CD16 (FcGRIII) mRNA, complete | 3.5, 4.5 |
| g186927 | Homo sapiens lysosomal membrane glycoprotein-1 (LAMP1) mRNA | 7.2 |
| g187054 | Human lymphocyte clathrin light-chain A mRNA, complete cds. | 3.9 |
| g187284 | Human Mac-1 gene encoding complement receptor type 3, CD11b, | 5.1, 4.6, 3.2, 3.1 |
| g187434 | Human monocyte chemotactic and activating factor (MCAF) | 11.1 |
| g187447 | Human monocyte chemotactic protein gene, complete cds. | 15.2, 8.8, 7.3, 12.1, 9.8 |
| g188114 | Human MHC class II HLA-DQ-beta (DQB1, DQw9), complete cds. | 3.3, 3.3 |
| g188134 | Human MHC class II DQ alpha mRNA, complete cds. | 6.6, 4.9, 7.1 |
| g188136 | Human MHC class II HLA-DQ-alpha (DR2-DQw1/DR4 DQw3) mRNA, | 3.4, 3.8 |
| g188217 | Human MHC class II HLA-DR4-beta (DR4,w4) gene, exon 3,4,5,6. | 4.2, 4.8 |
| g188285 | Human MHC class II HLA-DRB4-null beta chain pseudogene | 4.0 |
| g188352 | Human MHC class II HLA-DRw53-associated glycoprotein | 4.0 |
| g188427 | Human HLA-DR alpha-chain (chain-p34) gene, exons 2, 3, 4 | 5.5 |
| g1905800 | H. sapiens MCP-2 gene. | 3.7, 3.3, 7.3 |
| g219907 | Human LD78 beta gene. | 4.9 |
| g264772 | thymosin beta-10 [human, metastatic melanoma cell line, | 3.4 |
| g288396 | H. sapiens NC28 mRNA for monocyte chemoattractant protein | 3.2 |
| g291887 | Homo sapiens cathepsin B mRNA, complete cds. | 31.5, 44.0, 22.1, 5.3, 10.6 |
| g291926 | Homo sapiens cystatin B mRNA, complete cds. | 5.2 |
| g29571 | Homo sapiens Hsc 70 pseudogene. | 6.9, 10.6 |
| g29709 | Human mRNA for cathepsin H (EC 3.4.22.16). | 3.2, 4.2, 3.2 |
| g29714 | Human mRNA for pro-cathepsin L (major excreted protein MEP). | 19.9, 34.8, 29.3, 23.5, 4.3 |
| g29850 | Human CDw40 mRNA for nerve growth factor receptor-related | 4.1, 3.9, 5.0 |
| g3002790 | Homo sapiens macrophage receptor MARCO mRNA, complete cds. | 4.2, 6.0, 7.7 |
| g30257 | human CST3 gene for cystatin C. | 3.9, 3.7, 3.5 |
| g30263 | H. sapiens CST4 gene for Cystatin D. | 3.6, 3.2, 3.9 |
| g30884 | Human mRNA for HLA class II DR-beta 1 (Dw14). | 3.8 |
| g3107914 | Homo sapiens mRNA for cathepsin V, complete cds. | 3.8, 4.5, 16.0 |
| g312143 | H. sapiens mRNA for M130 antigen cytoplasmic variant 1. | 3.4, 3.1 |
| g31335 | Human FcRII mRNA for immunoglobulin G receptor. | 3.6 |
| g31396 | Human mRNA for fibronectin (FN precursor). | 10.0, 76.4, 3.2, 15.0, 81.3, |
| | | 9.6, 19.7, 28.9, 5.6, 27.9 |
| g32210 | Human mRNA for HLA class II DR-beta (HLA-DR B). | 4.3, 5.5 |
| g32291 | Human mRNA fragment for class II histocompatibility antigen | 4.0 |
| g339688 | Human thymosin beta-4 mRNA, complete cds. | 3.8, 4.6 |
| g34511 | Membrane cofactor protein part of complement system | 3.1 |
| g34513 | H. sapiens mRNA for monocyte chemoattractant protein 1 | 11.9, 11.3 |
| g34648 | Human gene for class II invariant gamma-chain (exon 2-8). | 4.4, 4.2, 4.1 |
| g35221 | Human heat-shock protein HSP70B' gene. | 3.3 |
| g3618344 | Homo sapiens mRNA for 26S proteasome subunit p28 | 3.3 |
| g37260 | human tra1 mRNA for human homologue of | 7.7, 7.0 |
| | murine tumor rejection protein | |
| g3776070 | histone deacetylase-like protein and complement component C2 | 3.6, 3.9, 3.8, 3.5 |
| g3869137 | Homo sapiens gene for CC chemokine PARC precursor | 26.4 |
| g3928171 | Human mRNA for beta-Fc-gamma receptor II | 4.1 |
| g4038732 | Homo sapiens mRNA for beta 2-microglobulin, complete cds | 3.1, 3.4 |
| g4097420 | Human monocyte chemotactic protein-4 precursor (MCP-4) | 11.2 |
| g439838 | Human CD86 antigen mRNA, complete cds. | 3.6 |
| g487829 | H. sapiens leukocyte adhesion glycoprotein p150,95 mRNA (CD11c) | 3.5, 4.1 |
| g5478221 | Homo sapiens MHC class II antigen (HLA-DRB1) mRNA, | 4.3, 7.9 |
| g557701 | Human HLA-DMB mRNA, complete cds. | 3.2 |
| g565646 | Human mRNA for proteasome subunit HsC10-II, complete cds. | 3.7 |
| g565648 | Human mRNA for proteasome subunit HsC7-I, complete cds. | 3.5 |
| g5725511 | Homo sapiens beta-2 microglobulin gene, complete cds. | 3.3 |
| g6288733 | Homo sapiens chemokine-like factor 1 (CKLF1) mRNA, | 3.7 |
| g6456875 | Home sapiens thymic stroma chemokine-1 precursor, mRNA, | 5.3 |
| g6467379 | Homo sapiens cathepsin Z precursor (CTSZ) mRNA, complete | 9.0 |
| g662840 | Human heat shock protein 27 (HSPB1) gene exons 1-3, complete | 3.8 |
| g6630853 | Homo sapiens chemokine-like factor 2 (CKLF2) mRNA, | 4.3 |
| g6996445 | Homo sapiens p10 gene for chaperonin 10 (Hsp10 protein) and | 5.0 |
| g703088 | Homo sapiens MHC class II DPw3-alpha-1 chain mRNA, complete | 6.4, 6.0, 5.3 |
| g971269 | Human mRNA for proteasome subunit p40 / Mov34 protein, | 3.1 |
| g188675 | Human mannose receptor mRNA, complete cds. | 47.6, 15.8 |

[0204] TABLE 2

| SEQ | | | | | | |
|---|---|---|---|---|---|---|
| ID NO | CLONE ID | TEMPLATE ID | GENBANK ID | DESCRIPTION | DATABASE | BDE |
| 1 | 1728696 | 992917.38 | g762940 | apoferritin H subunit | genpept | −4.4 |
| 2 | 3486093 | 977676.22 | g6103358 | smoothelin-B | genpept | −8.9 |
| 3 | 1563184 | 891492.1 | g1911529 | ficolin [human, uterus, mRNA, 1736 nt]. | gbpri | −4.7 |
| 3 | 1716583 | 891492.1 | g1911529 | ficolin [human, uterus, mRNA, 1736 nt]. | gbpri | −10.1 |
| 4 | 379425 | 990840.1 | g29980 | H. sapiens CL 100 mRNA for protein tyrosine phosphatase | gbpri | −4.4 |
| 5 | 2232685 | 990840.12 | g29980 | H. sapiens CL 100 mRNA for protein tyrosine phosphatase | gbpri | −4.1 |
| 4 | 2232685 | 990840.1 | g29980 | H. sapiens CL 100 mRNA for protein tyrosine phosphatase | | |
| 6 | 1900285 | 021899.7 | g401762 | Homo sapiens ataxia-telangiectasia group D-associated protein | gbpri | −3.4 |
| 7 | 292810 | 203351.6 | g1754608 | Homo sapiens DNA for SCM-1 beta precursor, complete cds. | gbpri | −3.2 |
| 8 | 341491 | 899156.22 | g29903 | Human cellular oncogene c-fos | gbpri | −5, −5.4, −5 |
| 9 | 1425456 | 013003.2 | g5138994 | Homo sapiens mRNA for dual specificity phosphatase MKP-5 | gbpri | −4.1 |
| 10 | 659029 | 237649.2 | g6942243 | Homo sapiens synaptic glycoprotein SC2 (SC2) mRNA | gbpri | −7.8 |
| 11 | 1217764 | 269725.3 | g609453 | Human G0S2 protein gene, complete cds. | gbpri | −3.6 |
| 12 | 2850723 | 989992.6 | g292036 | Human helix-loop-helix basic phosphoprotein (G0S8) gene, | gbpri | −3.3 |
| 13 | 2850723 | 989992.1 | g292036 | Human helix-loop-helix basic phosphoprotein (G0S8) gene, | | |
| 14 | 200836 | 246772.4 | g35791 | Human HPTP epsilon mRNA for protein tyrosine phosphatase | gbpri | −4 |
| 15 | 2197952 | 1327183.6 | g2828536 | Human Hsp27 ERE-TATA-binding protein (HET) mRNA | gbpri | −4.9 |
| 16 | 1958560 | 127112.53 | g292833 | Human TR3 orphan receptor mRNA, complete cds. | gbpri | −3.4 |
| 17 | 1958560 | 127112.19 | | | | |
| 18 | 1506061 | 336965.2 | g186410 | Human inhibin A-subunit mRNA, complete cds. | gbpri | −5.2 |
| 19 | 2172334 | 253946.17 | g186353 | Human membrane glycoprotein gp130 mRNA, complete cds. | gbpri | −5.1 |
| 20 | 1713166 | 284616.2 | g219868 | Human mRNA for HM89. | gbpri | −3.3 |
| 21 | 1640312 | 401269.21 | g404012 | Human pre-B cell enhancing factor (PBEF) | gbpri | −5.7 |
| 22 | 3238201 | 401269.14 | g404012 | Human pre-B cell enhancing factor (PBEF) | gbpri | −3.1, −3.3 |
| 21 | 3238201 | 401269.21 | g404012 | Human pre-B cell enhancing factor (PBEF) | | |
| 23 | 3280041 | 401269.5 | g404012 | Human pre-B cell enhancing factor (PBEF) | gbpri | −5.7 |
| 21 | 3280041 | 401269.21 | g404012 | Human pre-B cell enhancing factor (PBEF) | | |
| 21 | 2964314 | 401269.21 | g404012 | Human pre-B cell enhancing factor (PBEF) | | |
| 24 | 2964314 | 221172.2 | g5523832 | Incyte Unique | gbpri | −3.8 |
| 25 | 3073089 | 055554.1 | g5523832 | Incyte Unique | gbpri | −3.5 |
| 26 | 1360375 | 331567.1 | | Incyte Unique | genpept | −3.4 |
| 27 | 702933 | 010742.1 | | Incyte Unique | gbpri | −4 |
| 28 | 1562722 | 202426.1 | | Incyte Unique | gbpri | −5.7 |
| 28 | 1871721 | 202426.1 | | Incyte Unique | gbpri | −5.3 |
| 29 | 3486126 | 132211.1 | | Incyte Unique | gbpri | −4.3 |

[0205] TABLE 3

| SEQ | | | | | | | |
|---|---|---|---|---|---|---|---|
| ID | | TEMPLATE | GENBANK | | DATA- | | |
| NO | CLONE ID | ID | ID | DESCRIPTION | BASE | BDE | E-VALUE |
| 30 | 2456671 | 018414.15 | g1293679 | Human sorting nexin 1 (SNX1) mRNA, complete cds. | gbpri | 4.0 | |
| 31 | 1901407 | 480348.17 | g3152937 | Homo sapiens sorting nexin 2 (SNX2) mRNA, complete cds. | gbpri | 3.7 | |
| 32 | 1659647 | 1135462.6 | g3127052 | Homo sapiens sorting nexin 3 (SNX3) mRNA, complete cds. | gbpri | 4.5 | |
| 33 | 2607957 | 1094479.5 | g1145690 | Human E2 ubiquitin conjugating enzyme UbcH5C | gbpri | 35.2 | |
| 34 | 2762981 | 155345.4 | g4335940 | Homo sapiens leucine aminopeptidase mRNA, complete cds. | gbpri | 6.1 | |
| 35 | 1661952 | 198893.4 | g7800156 | Home sapiens triggering receptor expressed on myeloid cells 2 | gbpri | 8.8 | |
| 35 | 2630138 | 198893.4 | g7800156 | Homo sapiens triggering receptor expressed | gbpri | 6.0 | |
| | | | | on myeloid cells 2 | | | |
| 35 | 2848362 | 198893.4 | g7800156 | Homo sapiens triggering receptor expressed | gbpri | 6.2 | |
| | | | | on myeloid cells 2 | | | |
| 36 | 1452045 | 200569.1 | g435969 | Human metalloproteinase (HME) mRNA, complete cds. | gbpri | 27.2 | |
| 36 | 1553128 | 200569.1 | g435969 | Human metalloproteinase (HME) mRNA, complete cds. | gbpri | 13.8 | |
| 36 | 1563275 | 200569.1 | g435969 | Human metalloproteinase (HME) mRNA, complete cds. | gbpri | 11.5 | |
| 37 | 2240033 | 233706.3 | g2199511 | Homo sapiens beta-3A-adaptin subunit of the AP-3 complex | gbpri | 3.6 | |
| 38 | 1975430 | 234729.3 | g6731234 | Home sapiens myoferlin (MYOF) mRNA | gbpri | 3.4 | |
| 38 | 2642654 | 234729.3 | g6731234 | Home sapiens myoferlin (MYOF) mRNA | gbpri | 3.2 | |
| 39 | 2060308 | 235152.9 | g1698398 | VAT1, an abundant membrane protein of cholinergic | gbpri | 4.4, 3.9 | |
| | | | | synaptic vesicles | | | |
| 40 | 1528052 | 238213.8 | g177204 | Human type IV collagenase mRNA, complete cds. | gbpri | 3.4 | |
| 41 | 2196988 | 242275.7 | g38068 | M.fuscata mRNA for pepsinogen A-2/3. | gbpri | 3.1 | |
| 42 | 3257673 | 257576.34 | g546087 | cytoplasmic antiproteinase = 38 kda intracellular | gbpri | 3.9 | |
| | | | | serine protease inhibitor (serpin) | | | |
| 43 | 2992363 | 343903.1 | g35951 | Human kidney mRNA fragment for renin (aa 105-401). | gbpri | 3.1 | |
| 44 | 2799255 | 348064.3 | g1172085 | Human squamous cell carcinoma antigen (SCCA1) gene | gbpri | 7.5 | |
| 45 | 1601009 | 413969.1 | g2228241 | Home sapiens clone rasi-3 matrix metalloproteinase RASI-1 | gbpri | 3.2 | |
| 46 | 1747756 | 416874.3 | g340159 | Human pro-urokinase mRNA, complete cds. | gbpri | 5.3 | |
| 47 | 2455295 | 437025.25 | g296739 | H. sapiens mRNA for macropain subunit zeta. | gbpri | 3.1 | |
| 48 | 1985367 | 478620.78 | g1890049 | Home sapiens mRNA for cysteine protease, complete cds. | gbpri | 4.7 | |
| 49 | 1274803 | 902393.23 | g189841 | Human prolidase (imidodipeptidase) mRNA, complete cds. | gbpri | 3.1 | |
| 50 | 1393032 | 992309.26 | g338668 | Human testicular angiotensin converting enzyme mRNA | gbpri | 5.2 | |
| 51 | 1404616 | 992309.27 | g178285 | Human angiotensin I-converting enzyme mRNA, gbpri | 3.3 | | |
| | | | | complete cds. | | | |
| 51 | 1427612 | 992309.27 | g178285 | Human angiotensin I-converting enzyme mRNA, | gbpri | 4.0, 3.4 | |
| | | | | complete cds. | | | |
| 52 | 154946 | 153659.2 | g32576 | H. sapiens mRNA for interleukin-1 receptor antagonist. | gbpri | 6.1, 4.6, 4.1 | |
| 52 | 519653 | 153659.2 | g32576 | H. sapiens mRNA for interleukin-1 receptor antagonist. | gbpri | 6.2 | |
| 53 | 1218389 | 242114.46 | g818880 | Pan troglodytes epididymal secretory protein precursor | gbpri | 6.0, 4.7 | |
| 53 | 1875737 | 242114.46 | g818880 | Pan troglodytes epididymal secretory protein precursor | gbpri | 8.6 | |
| 54 | 1446858 | 242114.47 | g818880 | Pan troglodytes epididymal secretory protein precursor | gbpri | 5.0, 4.8 | |
| 55 | 1375759 | 242114.48 | g818880 | Pan troglodytes epididymal secretory protein precursor | gbpri | 3.4 | |
| 56 | 2722128 | 244973.9 | g2978559 | Homo sapiens vascular endothelial cell growth factor 165 | gbpri | 5.9 | |
| 57 | 1273066 | 290224.2 | g1223889 | Human putative T1/ST2 receptor binding protein precursor | gbpri | 3.1 | |
| 58 | 1314322 | 331428.2 | g1885307 | H. sapiens mRNA for IL13 receptor alpha-1 chain. | gbpri | 3.5 | |
| 59 | 2057240 | 401593.10 | g1203964 | Home sapiens bone-derived growth factor (BPGF-1) | gbpri | 3.1 | |
| 60 | 504786 | 199772.6 | g187297 | Human MAL protein gene mRNA, complete cds | gbpri | 3.4 | |
| 61 | 1505813 | 330836.1 | g189263 | Human notch group protein (N) mRNA, partial cds. | gbpri | 9.9 | |
| 62 | 518094 | 902142.11 | g2653870 | Home sapiens leucocyte immunoglobulin-like receptor-5 | gbpri | 3.1 | |
| 63 | 351384 | 995211.5 | g184428 | Human heparan sulfate proteoglycan (HSPG) core protein, 3′ | gbpri | 6.2, 5.4 | |
| 63 | 1601035 | 995211.5 | g184428 | Human heparan sulfate proteoglycan (HSPG) core protein, 3′ | gbpri | 6.8 | |
| 64 | 1435222 | 235310.12 | g2905995 | Homo sapiens DAP12 gene, complete cds. | gbpri | 4.4 | |
| 65 | 1402833 | 900031.4 | g2094872 | H. sapiens DAP-kinase mRNA. | gbpri | 3.7 | |
| 66 | 2493520 | 013521.17 | g38274 | human ret proto-oncogene mRNA for tyrosine kinase | gbpri | 4.5 | |
| 67 | | 013521.18 | | | | | |
| 68 | 1867423 | 032942.8 | g763112 | H. sapiens ERK3 mRNA. | gbpri | 3.6 | |
| 69 | 157088 | 149914.21 | g1418933 | H. sapiens mRNA for protein-tyrosine-phosphatase | gbpri | 3.1 | |
| 70 | 2501777 | 276948.4 | g31197 | Human c-erb-B-2 mRNA. | gbpri | 5.7 | |
| 71 | 810002 | 347283.16 | g531819 | Human B lymphocyte serine/threonine protein kinase | gbpri | 30.4 | |
| 72 | 1418741 | 349727.2 | g306804 | Human G protein-coupled receptor kinase (GRK5) | gbpri | 19.5 | |
| 73 | 2662471 | 350230.2 | g189982 | Human testis-specific cAMP-dependent protein kinase | gbpri | 3.7 | |
| 74 | 1524551 | 386989.40 | g1526989 | Human cAMP-dependent protein kinase type I-alpha subunit | gbpri | 3.2 | |
| 75 | 1437116 | 434608.8 | g34275 | Human mRNA for T200 leukocyte common | gbpri | 3.2 | |
| | | | | antigen (CD45, LC-A). | | | |
| 76 | 1725791 | 891141.5 | g3043926 | Home sapiens Tat-interacting protein TIP30 | gbpri | 3.1 | |
| 77 | 1820994 | 233653.13 | g2738496 | Homo sapiens putative oral tumor suppressor protein (doc-1) | gbpri | 3.5 | |
| 78 | 191334 | 253405.7 | g1297329 | Human mitogen-responsive phosphoprotein DOC-2 mRNA | gbpri | 5.1 | |
| 79 | 1509469 | 197600.12 | g3800808 | Homo sapiens methyl-CpG binding | gbpri | 3.7 | |
| | | | | protein MBD4 (MBD4) mRNA, | | | |
| 80 | 818223 | 1078199.1 | g38031 | Human ZNF43 mRNA | gbpri | 3.5 | |
| 81 | 2208461 | 025138.1 | g2088550 | similar to 52kd Ro/SSA protein and RFP | gbpri | 9.7 | |
| 82 | 33091 | 1000222.1 | g181485 | Human DNA-binding protein B (dbpB) gene, 3′end. | gbpri | 3.9 | |
| 83 | 1818802 | 1079467.1 | g468707 | H. sapiens OZF mRNA. | gbpri | 3.3 | |
| 84 | 2881835 | 1082203.1 | g6409344 | Home sapiens zinc finger protein ZNF180 (ZNF180) mRNA, | gbpri | 3.1 | |
| 85 | 1434547 | 1096748.6 | g509777 | H. sapiens ERF-2 mRNA. | gbpri | 7.7 | |
| 86 | 1467384 | 1098409.1 | g181986 | Human early growth response 2 protein | gbpri | 3.3 | |
| | | | | (EGR2) mRNA, complete | | | |
| 86 | 3603037 | 1098409.1 | g181986 | Human early growth response 2 protein | gbpri | 3.2 | |
| | | | | (EGR2) mRNA, complete | | | |
| 87 | 2115028 | 1098584.1 | g6644296 | Home sapiens IFI16b (IFI16b) mRNA, | gbpri | 3.5 | |
| | | | | complete cds. | | | |
| 88 | 2115028 | 40652.29 | | | | | |
| 89 | 1685409 | 1099277.17 | g3641537 | Homo sapiens small EDRK-rich factor 2 (SERF2) mRNA | gbpri | 3.9 | |
| 90 | 2735724 | 197748.7 | g5757883 | Home sapiens zinc finger Homeobox protein ZHX1 mRNA, | gbpri | 29.3 | |
| 91 | 1797396 | 241930.15 | g726512 | Human nuclear orphan receptor LXR-alpha | gbpri | 3.1 | |
| | | | | mRNA, complete cds. | | | |
| 92 | 1274720 | 246504.1 | g287642 | H sapiens cDNA for TREB protein. | gbpri | 4.2 | |
| 93 | 1575463 | 253341.11 | g2947300 | Homo sapiens MMS2 (MMS2) mRNA, complete cds. | gbpri | 3.1 | |
| 94 | 1292502 | 334064.3 | g2190973 | Homo sapiens breast cancer suppressor candidate 1 (bcsc-1) | gbpri | 4.9 | |
| 94 | 2378649 | 334064.3 | g2190973 | Home sapiens breast cancer suppressor candidate 1 (bcsc-1) | gbpri | 5.5 | |
| 94 | 2595814 | 334064.3 | g2190973 | Homo sapiens breast cancer suppressor candidate 1 (bcsc-1) | gbpri | 3.6 | |
| 95 | 1554495 | 347723.6 | g1374697 | Homo sapiens mRNA for nuclear protein, | gbpri | 5, 3.4 | |
| | | | | NP220, complete cds. | | | |
| 96 | 1628271 | 902614.15 | g1480099 | H. sapiens mRNA for peroxisome proliferactor activated | gbpri | 4.3 | |
| 97 | 1969563 | 995119.1 | g186624 | Human c-jun proto oncogene (JUN), | gbpri | 4.0 | |
| | | | | complete cds, clone hCJ-1. | | | |
| 98 | 3117417 | 999437.3 | 9498722 | H. sapiens HZF2 mRNA for zinc finger protein from U-937 | gbpri | 3.7 | |
| 99 | 27775 | 1225522.1 | g28434 | Human mRNA for apoferritin H chain type. | gbpri | 3.4, 3.5 | |
| 100 | 262983 | 235447.5 | g37432 | Human mRNA for transferrin receptor. | gbpri | 4.3, 3.3 | |
| 101 | 3121380 | 139899.22 | g182513 | Human ferritin L chain mRNA, complete cds. | gbpri | 23.2 | |
| 102 | 2055571 | 977615.8 | g313158 | H. sapiens mRNA for GM2 activator protein. | gbpri | 4.1 | |
| 103 | 1556827 | 995174.7 | g2276462 | Homo sapiens Niemann-Pick C disease | gbpri | 8.0 | |
| | | | | protein (NPC1) mRNA; similar to patche | | | |
| 104 | 2515389 | 346599.14 | g178848 | Human apolipoprotein E | gbpri | 5.7, 22.3, | |
| | | | | | | 18.8 | |
| 104 | 2516686 | 346599.14 | g178848 | Human apolipoprotein E | gbpri | 17.2, 16.2 | |
| 105 | 2369312 | 1328674.2 | g178830 | Human apolipoprotein C-I (VLDL) gene, complete cds. | gbpri | 3.9 | |
| 106 | 1214221 | 1099498.9 | g178830 | Human apolipoprotein C-I (VLDL) gene, complete cds. | gbpri | 3.4 | |
| 106 | 2604020 | 1099498.9 | g178830 | Human apolipoprotein C-I (VLDL) gene, complete cds. | gbpri | 4.8, 4.0 | |
| 107 | 1694113 | 049457.6 | g187209 | Human lipoprotein lipase mRNA, complete cds. | gbpri | 6.1 | |
| 107 | 2118094 | 049457.6 | g187209 | Human lipoprotein lipase mRNA, complete cds. | gbpri | 4.5 | |
| 108 | 487539 | 092511.1 | g1255603 | Human mRNA for cytosolic malate | gbpri | 3.4 | |
| | | | | dehydrogenase, complete cds. | | | |
| 108 | 491360 | 092511.1 | g1255603 | Human mRNA for cytosolic malate | gbpri | 7.5 | |
| | | | | dehydrogenase, complete cds. | | | |
| 109 | 2446571 | 092511.6 | g1255603 | Human mRNA for cytosolic malate | gbpri | 19.4 | |
| | | | | dehydrogenase, complete cds. | | | |
| 110 | 1488759 | 238609.2 | g1060902 | Human mRNA for phosphatidylinositol transfer protein | gbpri | 4.5 | |
| 110 | 2122844 | 238609.2 | g1060902 | Human mRNA for phosphatidylinositol transfer protein | gbpri | 4.0 | |
| 111 | 2224733 | 252895.15 | g181477 | Human diazepam binding inhibitor (DBI) mRNA | gbpri | 3.3 | |
| 112 | 2805736 | 252895.16 | g181477 | Human diazepam binding inhibitor (DBI) mRNA | gbpri | 4.8 | |
| 113 | 2537805 | 99588012 | g182353 | Human fatty acid binding protein homologue | gbpri | 10.3, 17.5 | |
| | | | | (PA-FABP) mRNA, | | | |
| 114 | 2673842 | 001726.1 | g5901760 | fatty acid binding protein homolog | gbpri | 28.3 | |
| 115 | 4013105 | 179368.2 | g1377853 | Human fatty acid binding protein FABP gene, complete cds. | gbpri | 3.5 | |
| 116 | 1524345 | 410917.7 | g506430 | H. sapiens (HepG2) LAL mRNA for lysosomal acid lipase. | gbpri | 11.5 | |
| 116 | 1970427 | 410917.7 | g506430 | H. sapiens (HepG2) LAL mRNA for lysosomal acid lipase. | gbpri | 6.1 | |
| 117 | 1658320 | 336012.15 | g179459 | Human alpha-polypeptide of N-acetyl-alpha-glucosaminidase | gbpri | 5.8 | |
| 117 | 2448129 | 336012.15 | g179459 | Human alpha-polypeptide of N-acetyl-alpha-glucosaminidase | gbpri | 5.4, 4.6 | |
| 118 | 2096385 | 235128.9 | g1160966 | Homo sapiens palmitoyl-protein thioesterase gene, complete | gbpri | 4.5 | |
| 118 | 1536287 | 235128.9 | g1160966 | Homo sapiens palmitoyl-protein thioesterase gene, complete | gbpri | 5.1 | |
| 119 | 1968372 | 215481.15 | g34733 | Human mRNA for acid phosphatase type 5 (EC 3.1.3.2). | gbpri | 4.9 | |
| 119 | 2206828 | 215481.15 | g34733 | Human mRNA for acid phosphatase type 5 (EC 3.1.3.2). | gbpri | 6.0 | |
| 120 | 3223710 | 885713.30 | g1008454 | Human mitochondrial ATP synthase subunit 9, P3 gene copy, | gbpri | 4.6 | |
| 121 | 3029307 | 902700.6 | g28939 | Human mRNA for F1-ATPase beta subunit (F-1 beta). | gbpri | 3.5 | |
| 122 | 2510502 | 401575.10 | g3335127 | Homo sapiens F1Fo-ATPase synthase | gbpri | 4.1 | |
| | | | | f subunit mRNA, complete | | | |
| 122 | 2816429 | 401575.10 | g3335127 | Homo sapiens F1Fo-ATPase synthase | gbpri | 4.1, 3.6 | |
| | | | | f subunit mRNA, complete | | | |
| 123 | 2487243 | 232818.15 | g3329377 | Homo sapiens vacuolar H(+)-ATPase | gbpri | 3.4 | |
| | | | | subunit mRNA, complete | | | |
| 124 | 921297 | 233103.10 | g1395161 | Homo sapiens mRNA for vacuolar ATPase, complete cds. | gbpri | 3.5 | |
| 124 | 2192978 | 233103.10 | g1395161 | Homo sapiens mRNA for vacuolar ATPase, complete cds. | gbpri | 3.9 | |
| 125 | 2510187 | 234313.13 | g509290 | H. sapiens mRNA for H+-ATP synthase subunit b. | gbpri | 3.1 | |
| 126 | 2510187 | 234313.14 | | | | | |
| 126 | 2683449 | 234313.14 | g509290 | H. sapiens mRNA for H+-ATP synthase subunit b. | gbpri | 3.8 | |
| 127 | 1648713 | 246862.17 | g559324 | Human mRNA for ATP synthase alpha subunit, complete cds. | gbpri | 6.2, 6.0 | |
| 128 | 859321 | 253969.2 | g522192 | Homo sapiens vacuolar H+-ATPase | gbpri | 12.5 | |
| | | | | Mr 56,000 subunit (HO57) | | | |
| 128 | 2075603 | 253969.2 | g522192 | Homo sapiens vacuolar H+-ATPase | gbpri | 7.5 | |
| | | | | Mr 56,000 subunit (HO57) | | | |
| 129 | 1232362 | 328615.1 | g2393721 | Human glutathione-S-transferase homolog | gbpri | 5.0 | |
| | | | | mRNA, complete cds. | | | |
| 130 | 2708221 | 998594.2 | g1747520 | Homo sapiens microsomal glutathione S-transferase 2 | gbpri | 3.1 | |
| 131 | 1923262 | 220837.3 | g183141 | Human gamma-glutmyl transpeptidase-related | gbpri | 3.2 | |
| | | | | protein (GGT-Rel) | | | |
| 132 | 2099268 | 410296.1 | g4106439 | multidrug resistance-associated protein 3 | gbpri | 5.1 | |
| 132 | 2642164 | 410296.1 | g3550323 | Homo sapiens canalicular multispecific | gbpri | 4.6, 4.3 | |
| | | | | organic anion transporter; similar to MRP | | | |
| 133 | 851304 | 218849.9 | g5006263 | g5006263 organic anion transporter OATP-B | genpept | 4.6 | |
| 134 | 851304 | 218849.15 | | | | | |
| 135 | 374690 | 218849.16 | g5006263 | g5006263 organic anion transporter OATP-B | genpept | 4.1 | |
| 133 | 374690 | 218849.9 | | | | | |
| 135 | 1512278 | 218849.16 | g5006263 | g5006263 organic anion transporter OATP-B | genpept | 5.0 | |
| 136 | 2448113 | 233319.14 | g3329393 | Homo sapiens voltage dependent | gbpri | 4.0 | |
| | | | | anion channel protein mRNA, | | | |
| 137 | 2021456 | 434763.22 | g340198 | Human voltage-dependent anion channel | gbpri | 3.3 | |
| | | | | isoform 1 (VDAC) mRNA, | | | |
| 138 | 2021456 | 434763.18 | | | | | |
| 139 | 1269859 | 336954.1 | g2739502 | Homo sapiens potassium channel mRNA, | gbpri | 4.7 | |
| | | | | complete cds. | | | |
| 140 | 2742236 | 337928.1 | g2584784 | H. sapiens mRNA homologous to the p64 | gbpri | 3.2 | |
| | | | | bovine chloride channel | | | |
| 141 | 109018 | 430431.18 | g4426566 | Homo sapiens chloride channel ABP mRNA, complete cds. | gbpri | 3.4 | |
| 142 | 2361578 | 407376.3 | g4581469 | Homo sapiens mRNA for SLC7A8 protein. | gbpri | 3.9 | |
| 143 | 1749790 | 439010.7 | g6826913 | Homo sapiens calcium transport ATPase ATP2C1 | gbpri | 4.5 | |
| 144 | 2056395 | 245184.1 | g339567 | Human transforming growth factor-beta induced gene product | gbpri | 10.4, 11.0 | |
| 145 | 2965657 | 352406.29 | g3360431 | Homo sapiens clone 23810 osteopontin mRNA, complete cds. | gbpri | 28.5 | |
| 146 | 229442 | 352406.28 | g3360431 | Homo sapiens clone 23810 osteopontin mRNA, complete cds. | gbpri | 11.5 | |
| 147 | 2495131 | 992455.45 | g187109 | Human 14 kd lectin mRNA, complete cds. | gbpri | 5.5 | |
| 148 | 2057608 | 255957.1 | g4323580 | Homo sapiens senescence-associated epithelial membrane | gbpri | 14.4 | |
| 149 | 1310287 | 235164.25 | g28525 | Human mRNA for amyloid A4 precursor | gbpri | 3.2 | |
| | | | | of Alzheimer's disease. | | | |
| 150 | 2645263 | 997363.3 | g4586835 | Homo sapiens mRNA for type II membrane protein | gbpri | 3.3 | |
| 151 | | 997363.1 | | | | | |
| 152 | 853968 | 1327354.1 | g32014 | Human HALPHA44 gene for alpha-tubulin, exons 1-3. | gbpri | 3.6 | |
| 152 | 1296056 | 1327354.1 | g32014 | Human HALPHA44 gene for alpha-tubulin, exons 1-3. | gbpri | 4.1 | |
| 153 | 1522716 | 358853.44 | g37851 | H. sapiens vimentin gene. | gbpri | 10.1 | |
| 154 | 2508570 | 243019.14 | g187455 | Homo sapiens macrophage capping protein | gbpri | 3.4 | |
| | | | | mRNA, complete cds. | | | |
| 155 | 3208407 | 1000016.22 | g36502 | Human mRNA for enteric smooth muscle gamma-actin. | gbpri | 4.0 | |
| 156 | | 1000016.44 | | | | | |
| 157 | 218631 | 1000084.41 | g340020 | human alpha-tubulin mRNA, complete cds. | gbpri | 6.1 | |
| 158 | 1269670 | 481480.2 | g7012928 | Homo sapiens SCG10 like-protein | gbpri | 3.5 | |
| 159 | 1469939 | 214181.1 | g461396 | Homo sapiens alpha-1 type XV collagen mRNA, | gbpri | 3.6 | |
| | | | | complete cds. | | | |
| 160 | 2190217 | 977305.3 | g829622 | Human myosin regulatory light chain mRNA, complete cds. | gbpri | 4.5, 3.3 | |
| 161 | 2379695 | 450223.3 | g7288158 | Homo sapiens mRNA for testis specific ankyrin-like protein | gbpri | 6.0 | |
| 162 | 2665489 | 375072.25 | g2739095 | Homo sapiens protein 4.1-G mRNA, complete cds. | gbpri | 3.1 | |
| 163 | 2926914 | 1039889.12 | g28251 | Human mRNA for beta-actin. | gbpri | 4.0 | |
| 164 | 3215205 | 245367.2 | g5932031 | Homo sapiens PEA15 protein (PEA15) gene, | 4.1 | | |
| | | | | exons 3 and 4 and | gbpri | | |
| 165 | 2444446 | 252747.21 | g998356 | Homo sapiens EB1 mRNA, complete cds | gbpri | 3.8 | |
| 166 | 1648449 | 229250.3 | g3006201 | Homo sapiens prostaglandin transporter | gbpri | 14.1 | |
| | | | | hPGT mRNA, complete | | | |
| 167 | 1886871 | 331734.3 | g189886 | Human prostaglandin endoperoxide | gbpri | 3.4 | |
| | | | | synthase mRNA, complete cds. | | | |
| 167 | 1595081 | 331734.3 | g249623 | prostaglandin G/H synthase {alternative splicing product} | gbpri | 4.7 | |
| 168 | | 331734.8 | | | | | |
| 169 | 1401683 | 441261.5 | g862374 | Human 180 kDa transmembrane PLA2 | gbpri | 4.6 | |
| | | | | receptor mRNA, complete cds. | | | |
| 170 | 638749 | 411208.4 | g2911111 | Homo sapiens mRNA for NRAMP2; innate immunity | gbpri | 3.4 | |
| 170 | 933140 | 411208.4 | g2911111 | Homo sapiens mRNA for NRAMP2; innate immunity | gbpri | 3.1, 3.1 | |
| 171 | 1241477 | 335940.2 | g2459617 | Homo sapiens Toll-like receptor 1 | gbpri | 3.4 | |
| | | | | (TLR1) mRNA, complete cds. | | | |
| 172 | 1661537 | 369213.26 | g177869 | Human alpha-2-macroglobulin mRNA, complete cds. | gbpri | 13.3 | |
| 173 | 1605616 | 222156.2 | g1050957 | Human chitotriosidase precursor mRNA, complete cds. | gbpri | 9.7 | |
| 174 | 1000988 | 234404.4 | g182836 | Human factor XIII subunit a mRNA, 3′ end. | gbpri | 11.0 | |
| 174 | 1874280 | 234404.4 | g182836 | Human factor XIII subunit a mRNA, 3′ end. | gbpri | 11.9, 9.3 | |
| 175 | 1436753 | 474310.15 | g339520 | Human transglutaminase (TGase) mRNA, complete cds. | gbpri | 22.7 | |
| 175 | 1672744 | 474310.15 | g339520 | Human transglutaminase (TGase) mRNA, complete cds. | gbpri | 14.5 | |
| 176 | 1557811 | 254107.1 | g37123 | Human mRNA for thrombomodulin precursor. | gbpri | 4.3 | |
| 177 | 1220371 | 218156.2 | g3925598 | Homo sapiens mRNA for DORA protein | gbpri | 14.5 | |
| 178 | 1533410 | 350788.2 | g407955 | Human membrane-associated protein (HEM-1) | gbpri | 4.7 | |
| | | | | mRNA, complete cds. | | | |
| 179 | 1999422 | 899239.5 | g29645 | H. sapiens mRNA for CAMPATH-1 (CDw52) antigen. | gbpri | 4.2, 3.5 | |
| 180 | 322866 | 382906.6 | g180142 | Human CD53 glycoprotein mRNA, complete cds. | gbpri | 3.2 | |
| 181 | 1874037 | 382906.16 | g180142 | Human CD53 glycoprotein mRNA, complete cds. | gbpri | 19.5 | |
| 182 | 2419118 | 269837.15 | g6563293 | Homo sapiens PIL protein mRNA, complete cds. | gbpri | 3.5 | |
| 183 | 1689409 | 241016.6 | g1737489 | Human p76 mRNA, complete cds. Membrane protein | genpept | 4.6 | |
| 184 | 2182130 | 005486.4 | g4336324 | Homo sapiens small membrane protein 1 (SMP1) mRNA, | genpept | 3.2 | |
| 185 | 2242283 | 977953.8 | | Incyte Unique | | 4.5 | |
| 186 | 2041671 | 404923.1 | | Incyte Unique | | 5.5 | |
| 187 | 1621280 | 449028.32 | | Incyte Unique | | 3.1 | |
| 188 | 1869766 | 330864.4 | | Incyte Unique | | 4.6 | |
| 189 | 1427838 | 39903.4 | | Incyte Unique | | 3.7, 3.2 | |
| 190 | 1683829 | 250445.3 | | Incyte Unique | | 4.0 | |
| 191 | 1996005 | 400961.22 | | Incyte Unique | | 3.3 | |
| 192 | 2503016 | 977835.14 | | Incyte Unique | | 3.1 | |
| 193 | 1748678 | 252920.1 | | Incyte Unique | | 4.7 | |
| 194 | 2716391 | 343863.10 | | Incyte Unique | | 3.1 | |
| 195 | 3134070 | 254547.9 | | Incyte Unique | | 10.3 | |
| 196 | 1996357 | 277726.11 | | Incyte Unique | | 4.1, 3.8 | |
| 197 | 1999313 | 246177.4 | | Incyte Unique | | 4.8 | |
| 198 | 2046715 | 410012.21 | | Incyte Unique | | 5.7 | |
| 199 | 1886544 | 410012.24 | | Incyte Unique | | 4.4 | |
| 200 | | 410012.20 | | Incyte Unique | | | |
| 201 | 2628690 | 1099099.16 | g2772672 | phospholipase D-like protein; g1575347 HU-K4 | genpept | 4.5 | 3.00E−99 |
| 202 | | 1099099.13 | | | | | |
| 201 | 642116 | 1099099.16 | g2772672 | phospholipase D-like protein; g1575347 HU-K4 | genpept | 3.7, 3.2 | |
| 203 | 663537 | 400253.14 | g2826476 | IL-17 receptor | genpept | 8.5 | 9.00E−30 |
| 204 | | 400253.17 | | | | | |
| 205 | 1509631 | 85803.4 | g50229 | C1q C chain [Mus musculus] | genpept | 9.1, 7.3 | 3.00E−71 |
| 206 | 2790509 | 253868.2 | g3879017 | similar to Ubiquitin-conjugating enzymes; cDNA EST | genpept | 3.5 | 2.00E−42 |
| 206 | 1426987 | 253868.2 | g3879017 | similar to Ubiquitin-conjugating enzymes; cDNA EST | genpept | 3.6 | 2.00E−42 |
| 207 | 2674742 | 158923.9 | g607003 | beta transducin-like protein | genpept | 4.2 | 2.00E−29 |
| 208 | 3330716 | 199716.3 | g7243708 | zinc transporter like 1 [Mus musculus] | genpept | 3.2 | 0 |
| 209 | 1620875 | 252899.8 | g6176319 | butyrophilin-like [Homo sapiens ] | genpept | 3.2 | 4.00E−35 |
| 210 | 627910 | 327544.2 | g7406950 | N system amino acids transporter NAT-1 [Mus musculus] | genpept | 5.0 | 1.00E−112 |
| 210 | 2007779 | 327544.2 | g7406950 | N system amino acids transporter NAT-1 [Mus musculus] | genpept | 6.1 | 1.00E−112 |
| 210 | 2726053 | 327544.2 | g7406950 | N system amino acids transporter NAT-1 [Mus musculus] | genpept | 4.6, 3.9 | 1.00E−112 |
| 211 | 868138 | 334842.5 | g6175860 | g1-related zinc finger protein [Mus musculus] | genpept | 22.7 | 2.00E−84 |
| 212 | 938514 | 406770.1 | g1841756 | GATA-5 cardiac transcription factor [Mus musculus] | genpept | 3.2 | 2.00E−84 |
| 213 | 518335 | 996806.15 | g19867 | extensin (AA 1-620) | genpept | 3.1 | 0.018 |
| 213 | 2727735 | 996806.15 | g19867 | extensin (AA 1-620) | genpept | 4.1 | 0.018 |
| 214 | 2495063 | 332263.1 | g5817244 | dJ20N2.1 similar to yeast and bacterial cytosine deaminase | genpept | 4.1 | 1.00E−89 |
| 215 | 2659055 | 255824.34 | g6572231 | dJ402G11.6 similar to Xenopus gamma-tubulin | genpept | 4.0 | 0 |
| 216 | 1963927 | 1095059.19 | | Incyte Unique | | 3.5 | |
| 217 | 1662589 | 902753.4 | | Incyte Unique | | 4.6 | |
| 218 | 2674037 | 232259.1 | | Incyte Unique | | 4.0 | |
| 219 | 1220608 | 330879.1 | | Incyte Unique | | 3.2 | |
| 220 | 1868520 | 370489.34 | | Incyte Unique | | 3.5 | |
| 221 | 1447681 | 233007.5 | | Incyte Unique | | 3.3 | |
| 222 | 2236427 | 422389.9 | | Incyte Unique | | 3.1 | |
| 223 | 1632936 | 228814.8 | | Incyte Unique | | 3.4 | |
| 223 | 1519414 | 228814.8 | | Incyte Unique | | 3.1 | |
| 224 | | 228814.10 | | Incyte Unique | | | |
| 225 | 519879 | 234169.3 | | Incyte Unique | | 3.4 | |
| 226 | 1656490 | 403676.1 | | Incyte Unique | | 15.9 | |
| 227 | 1536275 | 231546.1 | | Incyte Unique | | 3.3 | |
| 228 | 2212027 | 247544.1 | | Incyte Unique | | 7.2 | |
| 229 | 782704 | 237320.1 | | Incyte Unique | | 3.2 | |
| 230 | 1848664 | 983197.1 | | Incyte Unique | | 13.3 | |
| 231 | 777478 | 481455.4 | | Incyte Unique | | 3.6 | |
| 231 | 2444774 | 481455.4 | | Incyte Unique | | 4.2 | |
| 232 | | 481455.6 | | | | | |
| 233 | 2718363 | 237733.2 | | Incyte Unique | | 3.3 | |
| 234 | 1907948 | 040151.2 | | Incyte Unique | | 3.4 | |
| 235 | 1864720 | 425448.2 | | Incyte Unique | | 3.6 | |
| 236 | 1857223 | 012712.1 | | Incyte Unique | | 4.2 | |
| 237 | 104201 | 009707.3 | | Incyte Unique | | 4.7 | |
| 238 | 1871285 | 019751.1 | | Incyte Unique | | 3.9 | |
| 239 | 1931160 | 065689.1 | | Incyte Unique | | 12.7 | |
| 240 | 1611844 | 279164.6 | | Incyte Unique | | 3.1 | |
| 241 | 2041593 | 428329.1 | | Incyte Unique | | 3.2 | |

[0206] TABLE 4

| SEQ | | | | | | |
|---|---|---|---|---|---|---|
| ID | | | | | | |
| NO | CLONE ID | TEMPLATE ID | GENBANK ID | DESCRIPTION | DATABASE | BDE |
| 242 | 154371 | 988891.1 | g35662 | Human mRNA for prointerleukin 1 beta. | gbpri | −3.1 |
| 243 | | 988891.13 | | | | |
| 244 | 3661567 | 1327819.1 | g306500 | Human CD9 antigen mRNA, complete cds; splice variant? | gbpri | −3.1 |
| 245 | | 1328161.1 | | | | |
| 246 | 1904149 | 1099039.5 | g307390 | Human ribosomal protein S13 (RPS13) mRNA, complete cds. | gbpri | −4.2 |
| 247 | 2527879 | 1328423.2 | g682747 | Human mRNA for Apo1_Human (MER5(Aop1-Mouse)-like protein), | gbpri | −2.8 |
| 248 | 3168108 | 232691.21 | g1518017 | Human TRAF-interacting protein I-TRAF mRNA, complete cds. | gbpri | −3.2 |
| 249 | 2785701 | 241888.40 | g186367 | Human interleukin 8 (IL8) gene, complete cds. | gbpri | −8.4 |
| 249 | 3732536 | 241888.40 | g186367 | Human interleukin 8 (IL8) gene, complete cds. | gbpri | −12.5 |
| 250 | 1972768 | 256005.49 | g178017 | Human activation (Act-2) mRNA, complete cds. | gbpri | −3.3 |
| 251 | 80154 | 256005.51 | g178017 | Human activation (Act-2) mRNA, complete cds. | gbpri | −4.6 |
| 252 | 1618459 | 331851.5 | g2276318 | Homo sapiens mRNA for dynein heavy chain. | gbpri | −2.8 |
| 253 | 1603857 | 341546.3 | g3978243 | Homo sapiens inhibitor of apoptosis protein-1 (MIHC) mRNA, | gbpri | −3 |
| 254 | 3126072 | 400834.2 | g5042402 | UCRI_HUMAN; RIESKE IRON-SULFUR PROTEIN; RISP | genpept | −2.6 |
| 255 | 4718119 | 407740.1 | g5305442 | Homo sapiens carnitine octanoyltransferase mRNA, complete | gbpri | −5 |
| 256 | 1543740 | 1082684.1 | | Incyte Unique | | −4.5 |
| 257 | 3122044 | 318000.8 | | Incyte Unique | | −3 |

[0207] TABLE 5

| SEQ ID NO | CLONE ID | TEMPLATE ID | GENBANK ID | DESCRIPTION | DATABASE | BDE |
|---|---|---|---|---|---|---|
| 258 | 1943863 | 206382.35 | g2558583 | neurogranin | genpept | 4 |
| 259 | 790977 | 1090400.1 | | Incyte Unique | | 2.9 |
| 260 | 1444550 | 018342.1 | | Incyte Unique | | 2.6 |

What is claimed is:

1. A combination comprising a plurality of cDNAs that are differentially expressed in DC, and selected from SEQ ID NOs:1-260 or their complements.

2. The combination of claim 1, wherein each of the cDNAs is downregulated in DC and is selected from SEQ ID NOs:1-29.

3. The combination of claim 1, wherein each of the cDNAs is upregulated in DC and is selected from SEQ ID NOs:30-241.

4. The combination of claim 1, wherein each of the cDNAs is upregulated in mature DC and is selected from SEQ ID NOs:242-257.

5. The combination of claim 1, wherein each of the cDNAs is downregulated in mature DC and is selected from SEQ ID NOs:258-260.

6. The combination of claim 1, wherein the cDNAs are immobilized on a substrate.

7. A high throughput method for detecting differential expression of one or more cDNAs in a sample containing nucleic acids, the method comprising:
(a) hybridizing the substrate of claim 6 with nucleic acids of the sample, thereby forming one or more hybridization complexes;
(b) detecting the hybridization complexes; and
(c) comparing the hybridization complexes with those of a standard, wherein differences between the standard and sample hybridization complexes indicate differential expression of cDNAs in the sample.

8. The method of claim 7, wherein the nucleic acids of the sample are amplified prior to hybridization.

9. The method of claim 7, wherein the sample is from a subject with cancer, infectious disease, autoimmunity, allergy, or graft versus host disease and comparison with a standard identifies or stages the disorder.

10. A high throughput method of screening a plurality of molecules or compounds to identify a ligand which specifically binds a cDNA, the method comprising:
(a) combining the combination of claim 1 with the plurality of molecules or compounds under conditions to allow specific binding; and
(b) detecting specific binding between each cDNA and at least one molecule or compound, thereby identifying a ligand that specifically binds to each cDNA.

11. The method of claim 10 wherein the plurality of molecules or compounds are selected from aptamers, DNA molecules, RNA molecules, peptide nucleic acid molecules, mimetics, peptides, transcription factors, repressors, and regulatory proteins.

12. An isolated cDNA selected from the group consisting of SEQ ID NOs:24-29, 187-202, 205-213, 216-241, 256, 257, 259, and 260.

13. A vector containing the cDNA of claim 12.

14. A host cell containing the vector of claim 13.

15. A method for producing a protein, the method comprising the steps of:
(a) culturing the host cell of claim 14 under conditions for expression of protein; and
(b) recovering the protein from the host cell culture.

16. A protein or a portion thereof produced by the method of claim 15.

17. A high-throughput method for using a protein to screen a plurality of molecules or compounds to identify at least one ligand which specifically binds the protein, the method comprising:
(a) combining the protein of claim 16 with the plurality of molecules or compounds under conditions to allow specific binding; and
(b) detecting specific binding between the protein and a molecule or compound, thereby identifying a ligand which specifically binds the protein.

18. The method of claim 17 wherein the plurality of molecules or compounds is selected from DNA molecules, RNA molecules, peptide nucleic acid molecules, mimetics, peptides, proteins, agonists, antagonists, antibodies or their fragments, immunoglobulins, inhibitors, drug compounds, and pharmaceutical agents.

19. A method of using a protein to produce an antibody, the method comprising:
a) immunizing an animal with the protein of claim 16 under conditions to elicit an antibody response;
b) isolating animal antibodies; and
c) screening the isolated antibodies with the protein, thereby identifying an antibody which specifically binds the protein.

20. A antibody produced by the method of claim 19.

The application's sequence listing, which the Patent Office published only in electronic form, follows.

SEQUENCE LISTING (260 sequences)

SEQ ID NO: 1 - DNA, 3257 bp, Homo sapiens
  misc_feature: Template ID: 992917.38
  unsure 84, 102, 383, 390, 1445-1759: a, t, c, g, or other
cagggtaaattgtggtcctccaattgaaagtccaccacaaaatgggggggtccattttttggtcaagtgggcccaagttttgtngcaagttcccagtaagtngacttgattcacattttttttcccaaatgtaatgcacactccattgcattcagcccgctctcccagtcatcacagtctggtttcttgatatcctgaaggaagattcggccacctcgttggttctgcagcttcatcagtttctcagcatgttccctctcctcatgagattggtgaagaaagtatttggcaaagttcttcaaagccacatcatcgcggtcaaagtagtaagacatggacagatcaacctggagctctacgcctcctacgtttacctgtccatntcttacnactttgacagatcaacctggagctctacgcctcctacgtttacctgtccatggtgagcgcgggcgggcctaagcggtggcgggggccgggcgcggttcccggggcgcgcgctggggcgggccgggggtgtggccacccgcgggctctcccgcctccctgcgcccttctggaaaatggaggctgctcgaggtttccgaggacttctctggcgcagaaagtcggggcagctggttcttctcggctgtaccctgagaatgctccctcctaggccagggccgcctctgcacacccttcttttttaaggagaccttggtgtcctgaaatcctggggttgcaagactgccagcctgtgtgatcaatcctgcggttaggaaggtggagttttgctttcccatcttttcctctgcctccggcatttggccctaaatgccagcgttttttgcttaggtatccagctcccgtccgcctgtgtgtggcggagctgctgggtaacggtgtcgaatagcaaaccttgggggctggcgggaggtggcttatcttgtgggtagatccctctcgagcagccgtatccacctctcggctctgcttatctctaagtcccacttgctttgaagcatatctctaggaatcgccccttctgcagtcaccgaagtgtcacctgaccttgcgcctaggggacctaatttatcttttatgtatcttactgtaagaggtgtggagtttggcctactaattgaacccccagttcttggataaagtccaccgacagttactgggcaagaaatttttcagtgatcagtggaatcaattttcccaaatcttggtcttaggcagtgtcgtgggagtcttccttagaattgccttgtgattgtccaaactatcccaagaataaatgtgttccaaatggatttgaaaacaggcctgtatttctgtgactgtcactgcctttcacaaacacttgactacatcaaatgtctaaaactgaaaatcaaatttttgtgatataactattataaaagtatgtttacatcaacatactgtccacatttgccacnnnnnnnnnnnnnnnnnnnnnnnnnnnnnnnnnnnnnnnnnnnnnnnnnnnnnnnnnnnnnnnnnnnnnnnnnnnnnnnnnnnnnnnnnnnnnnnnnnnnnnnnnnnnnnnnnnnnnnnnnnnnnnnnnnnnnnnnnnnnnnnnnnnnnnnnnnnnnnnnnnnnnnnnnnnnnnnnnnnnnnnnnnnnnnnnnnnnnnnnnnnnnnnnnnnnnnnnnnnnnnnnnnnnnnnnnnnnnnnnnnnnnnnnnnnnnnnnnnnnnnnnnnnnnnnnnnnnnnnnnnnnnnnnnnnnnnnnnnnnnnnnnnnnnnnnnnnaggggtttttaattttataaataaatatgtggtacagctggcagactcctgagctcagttttaaccatgctttaacatggttaatacaggagcagggaggagaaaaggactaagtgcagggtcagtactccagcgccctctcatcagacaatgaattctgacactggctgtaagttttctgtgcagtaatacagatccttaagacattgccccaggcaatgcccataatatcctaaaggttccttgaagttaagtttcaaggatcaagtttcagttttctattttagaatagaaacattactcttgggttcaatccagtagctcatctgccccccagtctccttaggcactgattccttcatgctgtgctttgagaaaggaagcctaggctgacgagaccatcttgcctccctgtagatcgtcacagctacctgtctctggggatccctagtataacacattcagtgttcccctttcagtcttactactttgaccgcgatgatgtggctttgaagaactttgccaaatactttcttcaccaatctcatgaggagagggaacatgctgagaaactgatgaagctgcagaaccaacgaggtggccgaatcttccttcaggatatcaaggtgaacaaaagatcctaggggtgtcatacttcatcatctggcagtgttcgggtatcagaaatcacttaaactagcaattgcccttataaagtgatgatacactgggcttttgccttttgtgcttttttaggcttaccatctaaactaaattaggcaaatagtaatgtcccttttgccaaaacgtggtggttagagatgatgggcttgctgacttctaggttagttggtagagatgcattaacctattctcattcagaaaccagactgtgatgactgggagagcgggctgaatgcaatggagtgtgcattacatttggaaaaaaatgtgaatcagtcactactggaactgcacaaactggccactgacaaaaatgacccccatgtgagtattggaaccccaggaaataaatggaggaaatcatttgccttagggattgggaaagctgcccactaactgtcttccccattgttttgcagttgtgtgacttcattgagacacattacctgaatgagcaggtgaaagccatcaaagaattgggtgaccacgtgaccaacttgcgcaagatgggagcgcccgaatctggcttggcggaatatctctttgacaagcacaccctgggagacagtgataatgaaagctaagcctcgggctaatttccccatagccgtggggtgacttccctggtcaccaaggcagtgcatgcatgttggggtttcctttaccttttctataagttgtaccaaaacatccacttaagttctttgatttgtaccattccttcaaataaagatggattttaaagactaagttgacagttaataatgactgtccatttaaagctacaataaacacagagctcatcatgctccaa

SEQ ID NO: 2 - DNA, 3215 bp, Homo sapiens
  misc_feature: Template ID: 977676.22
  unsure 336-393: a, t, c, g, or other
ctgttcaactgaaatatatgtgtcatatctcatacttttttaaaaaaactgtcatacttggaacaaggatatttagccttgggaatctaattttttgttacagttggttggccagcactccttaatggaaacagctgtccatcatttgacttagggctagaccgtttttgttctaggcattaaaataataccagttactgttatctagtatgtaataatttttagaagtttatcctttcatgaagtaaattaatcacacaactgaagagttatgttaaaagaactacatttttctgtttgtgctatgtttgttttttttttgagacggagtgttgnnnnnnnnnnnnnnnnnnnnnnnnnnnnnnnnnnnnnnnnnnnnnnnnnnnnnnnnnngtttgaccttcctcctgaggacaacaggagttataaagggtttccaaacagagaagggatggatatagcattctaggaccttcctcggatgaggcttggatgagagatgggatggactagatgactggaatagcttaagagctagagagacaggcttcccaatagatctggtttggagagggagagggaaggtcaagaagtctgccaggctcctgtgtgggcactggggagttggtggtgccatactccaaagtggggagctcaggagcaggaccagttcaacaggaagatgtttctggctggggactctggatcctaagccagctgtggcatttcctctctggtcacctcacctcagtaccaaagtaaagaattcagatcctaaactaactaccccattacagacaaggagctcagagagagacgtgggctaagactgtcctgggggtgggagggagagggaagatggttaggtcagagctggggccagaaactgagactccaaactccccacttagtggctgttttccttgccccatcactgtgttcccgcccattttgtagagaggattgaaaatagaggcccagaaggagcaaggggattggctgaaggaatgtgagtcagtgacaggtaggggcacactcagatgcccctcagggcctggagccattgtggggggcagtccacatgtgcacacacacactcagagaaggagcacagatgagtggcggatgggcttggtgctatctccagatcatatatggacttaggagctgctgcccagcaagccagcttggagggagaggggcccagcccagccctgatccagttggaaagtgtgactcagccgtgctgttgctcaagttgcctggtgtttggcctgtcactggggcagcctgagccctgagccctgagccccagtgtaaacaatggctttataaggtctccagggaagggagtggggcgggagggagcaccaggttggagagggcggtcgggatccccaggacgatagccacagctggaagaagcttcagagagaggctgcctttgcatcatggtacagctcgggaaacaagcccagtctgggatagggatgaccctaggggcacgtggcacatcagcagcagacccagaaccctctcactcatcctaaattcttgtaaggtctcaaatgagatagagaataactgtcctgttctaaagagggggaaacagtcatagaaaagggccttatctagcacccacaactggttagggatacagtctggactaaaacagaggtgttcggtgttctgcctcccaggtttcttctctgaaggagtccaggtgagctgggggtaggcccagccctaccacagttctgagtttgtccataagggcacgagatgggaggtggtcttgggttctcaggtgtcttgagaataaggagcaattgttgccattatgccttccctgccataggaaactcattcagcaacattgaatgcttgctatgtcccaggtatggcagataggagggatcaaggcagaagaggtcttgctctgggggttgagggacaggggaaaaggagccagagagcagactccagcttcagagctctgggagctgtcagttgcttaataggcacaacccactcactccagagtggggaaaaggctttgccaacacccagaactgggggcctgggtcccatgcggcctagcctgcacttactaagccgtgtggcttgaaaacaaatggctcctctgctctgtgactcagtttccttatctgtgaagggcagctagcattctgaaggatggccagaagggtggtccccccgagcatggcatagatggtccattggtattggctgggatcctcatctgcctcctctgctctacccaaggcaggtgataagggttagagaacccctctgctgcccacacgttccctggcctccatctccagcagcagggttatccccaccccctgtcaaagaataggggtccctgggcctctcaacaggaagtaccagatcaggcagctagcagacaatcatcggtggaccacagggccactagagtgagacctatccatagataaagattggccagtgatgaagcccatctgggtgcaaaggccgagctgagaggcttctaccaactggagtgtgccagtgagggtgagcagaaggtggtctccagggagaacatgggcagggtttggagccagcacctccccagggttggaggaagcagacccaggacctgcctgactgggatggggctctcttctgccatctccgcctccacctgcctagctctgctcccccgccccgagagatgcctccaggcttgggtagatgaagccaggggcttcctgccttcctggaaggcttttccctgtctggagtttatgaaagaccagcaggcaatgcggcaataaaaaagaccttggggtagaggggcgccacgagaggcgggtctggcgctgacatccaaccccgtgccccctccctgcaggatgctggtggactgtgtgcccctggtggaggtggacgacatgatgatcatgggcaagaagcctgaccccaagtgtgtcttcacctatgtgcagtcgctctacaaccacctgcgacgccacgaactgcgcctgcgcggcaagaatgtctagcctgcccgcccgcatggccagccagtggcaagctgccgcccccactctccgggcaccgtctcctgcctgtgcgtccgcccaccgctgccctgtctgttgcgacaccctcccccccacatacacacgcagcgttttgataaattattggttttcaacgaaaaa

SEQ ID NO: 3 - DNA, 1789 bp, Homo sapiens
  misc_feature: Template ID: 891492.1
gtggcacaaggcgagagctggtttcctctgccctgttagagctgggggactcttcagagtcaaaggccagagagcatggagctgagtggagccaccatggcccgggggctcgctgtcctgctagtcttgttcctgcatatcaagaacctgcctgcccaggctgcggacacatgtccagaggtgaaggtggtgggcctggagggctctgacaagctcaccattctccgaggctgcccggggctgcccggggccccagggccaaagggagaggcaggtgtcattggagagagaggagaacgcggtctccctggagcccctggaaaggcaggaccagtggggcccaaaggagaccgaggagagaaggggatgcgtggagagaaaggagacgctgggcagtctcagtcgtgtgcgacaggcccacgcaactgcaaggacctgctagaccgggggtatttcctgagcggctggcacaccatctacctgcccgactgccggcccctgactgtgctctgtgacatggacacggacggagggggctggaccgttttccagcggaggatggatggctctgtggacttctatcgggactgggccgcatacaagcagggcttcggcagtcagctgggggagttctggctggggaatgacaacatccacgccctgactgcccagggaagcagcgagctccgtgtagacctggtggactttgagggcaaccaccagtttgctaagtacaaatcattcaaggtggctgacgaggcagagaagtacaagctggtactgggagcctttgtcgggggcagtgcgggtaattctctaacgggccacaacaacaacttcttctccaccaaagaccaagacaatgatgtgagttcttcgaattgtgctgagaagttccaaggagcctggtggtacgccgactgtcatgcttcaaacctcaatggtctctacctcatgggaccccatgagagctatgccaatggtatcaactggagtgcggcgaaggggtacaaatatagctacaaggtgtcagagatgaaggtgcggcccgcctagacgggccaggacccctccacatgcacctgctagtggggaggccacacccacaagcgctgcgtcgtggaagtcaccccatttccccagccagacacactcccatgacgcccacagctgcccctttgcccccagctcagtcaagccgccacatgcccacaacctcaccagagggagaattatgtttctaaatatgtttactttgggacagaaaagttttaccagtttcagtgtgtgtttcttgaacaccagtggttttgatcactttcctgtgtctgttgcacggcaggtctttccctggaatttggtaagtcgggaagagtcaggaccctcatttagcagatggcactaccgatgttcagggaggttgagtgacttttgcgaggattttccacctccagtaattgacacagggcgatcctcacctccacccccaagcctcccccatccccccatgcctcactcacaacacttcacacttcttgaaaaaggtcactttggggtccagaaaacacttactaaaaagggggaaagtttagtaggaacttttctgcttcccaccacggcagagttcatgctttgggctggctggctgctgggaagagataaacacttagcactcactaagtgagcgcctggtcagccacctgcacagagaagattccgaagaggccttcctcccacacacagacctcagctagaggggacgcggacctcagtgggaaaagctgcacaa

SEQ ID NO: 4 - DNA, 3218 bp, Homo sapiens
  misc_feature: Template ID: 990840.1
ttcaaggcccagactggcacctgaagatgccccaggtgaaaatgcccaagttcagcatgcctggcttcaaaggagagggcccagatgtggatgtgaacctgcccaaggctgaccttgatgtctcaggacccaaggtggacattgatgttccagatgtgaatatcgaaggcccagagggaaagttgaaaggtcccaaattcaagatgcctgagatgcacatcaaagcccccaagatctccatgcctgacattgatcttaacctgaaaggacccaaagtgaagggtgatatggatgtgtctctgcccaaagtggaaggtgacatgcaagttcctgacttggatattaaaggccccaaagtggatattaatgccccagatgtggatgttcgaggcccagactggcacctgaagatgcctaagataaaaatgcccaagatcagcatgcctggcttcaaaggagaaggtccagaagtggatgtgaacctgcccaaggctgaccttgacgtctcaggacccaaggtggacgttgatgttccagatgtgaatattgaaggtccagatgcgaaactgaagggccctaaattcaagatgccagagatgaacatcaaagcccccaaaatatcgatgcctgacattgatttaaacctgaagggccccaaagtcaagggcgatgtggatgtttctctgcccaaaatggaaggtgacctcaaggcccctgaagttgacatcaagggccccaaagtggacattaatgctccagatgttgatgttcaaggcccagactggcacctgaagatgcccaaggtgaaaatgcccaagttcagcatgcctggcttcaaaggagagggcccagatgtggatgtgaacctgcccaaggctgaccttgatgtctcaggacccaaggtggacattgatgttccagatgtgaatatcgaaggcccagagggaaagttgaaaggtcccaaattcaagatgcctgagatgaacatcaaaaccccaagatctccatgcctgatgttgatctcaaccttgaaagggacccaaagtcaaaggtagatgtggatgtgtctgtcgccaaaggtggaaggagagttaaaaggtccagaattggatgtcaaaggtcccaaattagatgctgacatgccagaagtagctgtggaaggccatttgggctgtgtgtgcgacgcgggtcggaggggcagtcgggggaaccgcgaagaagccgaggagcccggagccccgcgtgacgctcctctctcagtccaaaagcggcttttggttcggcgcagagagacccgggggtctagcttttcctcgaaaagcgccgccctgcccttggccccgagaacagacaaagagcaccgcagggccgatcacgctgggggcgctgaggccggccatggtcatggaagtgggcaccctggacgctggaggcctgcgggcgctgctgggggagcgagcggcgcaatgcctgctgctggactgccgctccttcttcgctttcaacgccggccacatcgccggctctgtcaacgtgcgcttcagcaccatcgtgcggcgccgggccaagggcgccatgggcctggagcacatcgtgcccaacgccgagctccgcggccgcctgctggccggcgcctaccacgccgtggtgttgctggacgagcgcagcgccgccctggacggcgccaagcgcgacggcaccctggccctggcggccggcgcgctctgccgcgaggcgcgcgccgcgcaagtcttcttcctcaaaggaggatacgaagcgttttcggcttcctgcccggagctgtgcagcaaacagtcgacccccatggggctcagccttcccctgagtactagcgtccctgacagcgcggaatctgggtgcagttcctgcagtaccccactctacgatcagggtggcccggtggaaatcctgccctttctgtacctgggcagtgcgtatcacgcttcccgcaaggacatgctggatgccttgggcataactgccttgatcaacgtctcagccaattgtcccaaccattttgagggtcactaccagtacaagagcatccctgtggaggacaaccacaaggcagacatcagctcctggttcaacgaggccattgacttcatagactccatcaagaatgctggaggaagggtgtttgtccactgccaggcaggcatttcccggtcagccaccatctgccttgcttaccttatgaggactaatcgagtcaagctggacgaggcctttgagtttgtgaagcagaggcgaagcatcatctctcccaacttcagcttcatgggccagctgctgcagtttgagtcccaggtgctggctccgcactgttcggcagaggctgggagccccgccatggctgtgctcgaccgaggcacctcgaggcacctccaccatggctgtgctcgaccgaggcacctccaccaccaccgtgttcaacttccccgtctccatccctgtccactccacgaacagtgcgctgagctaccttcagagccccattacgacctctcccagctgctgaaaggccacgggaggtgaggctcttcacatcccattgggactccatgctccttgagaggagaaatgcaataactctgggaggggctcgagagggctggtccttatttatttaacttcacccgagttcctctgggtttctaagcagttatggtgatgacttagcgtcaagacatttgctgaactcagcacattcgggaccaatatatagtgggtacatcaagtccatctgacaaaatggggcagaagagaaaggactcagtgtgtgatccggtttctttttgctcgcccctgttttttgtagaatctcttcatgcttgacatacctaccagtattattcccgacgacacatatacatatgagaatataccttatttatttttgtgtaggtgtctgccttcacaaatgtcattgtctactcctagaagaaccaaatacctcaatttttgtttttgagtactgtactatcctgtaaatatatcttaagcaggtttgttttcagcactgatggaaaataccagtgttgggtttttttttagttgccaacagttgtatgtttgctgattatttatgacctgaaataatatatttcttcttctaagaagacattttgttacataaggatgacttttttatacaatggaataaattatggcatttctattgaaatttcaaaaaa

SEQ ID NO: 5 - DNA, 1632 bp, Homo sapiens
  misc_feature: Template ID: 990840.12
tgcagttcctgcagtaccccactctacgatcaggttagtaggtgtccctgccacagggaagaagtaagaactggcaaaggcatggaagagtagtgccagggagaatatagaaagtgacctgcagcattatttataacggaggggacacagggatatgatttattccacagttaagtggtctgacggagccgagtctccagttgtaggctctacggaaatgaacttgctggtcctgcccaggcaaatgggcttagttccctatttatttatcctccagcaacagaactgagttcactcggtatctgaaattgacttttccagcagaaagtttttgtgggtatgggcactggccttggctttgagcaagcttgatgaatgttggatatttctggatttcagggtggcccggtggaaatcctgccctttctgtacctgggcagtgcgtatcacgcttcccgcaaggacatgctggatgccttgggcataactgccttgatcaacgtctcagccaattgtcccaaccattttgagggtcactaccagtacaagagcatccctgtggaggacaaccacaaggcagacatcagctcctggttcaacgaggccattgacttcataggtaaatggaatggatgcctggggcttttctgcctttctcttctcattttagccactaagcccaacctctgtggcaagagcttgaagttttctgagccttcttccacacattcagtatcagtctggtgtgggcaacattcctgtaaaatatgaatttgattcgatgtcccactttacagatttgcaaagtggggctcacaaagttgaattgactggtctgagatctatctgctaagtggaaatccccagtctgagtttaaatcctgtgccatcctttgcacagtgcccacgttgcctccatgaacagtatccatgtgatggcatgtggtgatgttgaccatttctagacaagacacacatgacctttctcagatacactgtacctgggcttggggtggttctcctgaactctcaagtaaccagccgctcctttggttttccagactccatcaagaatgctggaggaagggtgtttgtccactgccaggcaggcatttcccggtcagccaccatctgccttgcttaccttatgaggactaatcgagtcaagctggacgaggcctttgagtttgtgaagcagaggcgaagcatcatctctcccaacttcagcttcatgggccagctgctgcagtttgagtcccaggtgctggctccgcactgttcggcagaggctgggagccccgccatggctgtgctcgaccgaggcacctccaccaccaccgtgttcaacttccccgtctccatccctgtccactccacgaacagtgcgctgagctaccttcagagccccattacgacctctcccagctgctgaaaggccacgggaggtgaggctcttcacatcccattgggactccatgctccttgagaggagaaatgcaataactctgggaggggctcgagagggctggtccttatttatttaacttcacccgagttcctctgggtttctaagcagttatggtgatgacttagcgtcaagacatttgctgaactcagcacattcgggaccat

SEQ ID NO: 6 - DNA, 3120 bp, Homo sapiens
  misc_feature: Template ID: 021899.7
ctcctcacaggtgtgtctctagtcctcgtggttgcctgccccactccctgccgagacgcctgccagaaaggtcacctatcctgaaccccagcaagcctgaaacagctcagccaagcaccctgcgatggaagctgcagatgcctccaggagcaacgggtcgagcccagaagccagggatgcccggagcccgtcgggccccagtggcagcctggagaatggcaccaaggctgacggcaaggatgccaagaccaccaacgggcacggcggggaggcagctgagggcaagagcctgggcagcgccctgaagccaggggaaggtaggagcgccctgttcgcgggcaatgagtggcggcgacccatcatccagtttgtcgagtccggggacgacaagaactccaactacttcagcatggactctatggaaggcaagaggtcgccgtacgcagggctccagctgggggctgccaagaagccacccgttacctttgccgaaaagggcgagctgcgcaagtccattttctcggagtcccggaagcccacggtgtccatcatggagcccggggagacccggcggaacagctacccccgggccgacacgggccttttttcacggtccaagtccggctccgaggaggtgctgtgcgactcctgcatcggcaacaagcagaaggcggtcaagtcctgcctggtgtgccaggcctccttctgcgagctgcatctcaagccccacctggagggcgccgccttccgagaccaccagctgctcgagcccatccgggactttgaggcccgcaagtgtcccgtgcatggcaagacgatggagctcttctgccagaccgaccagacctgcatctgctacctttgcatgttccaggagcacaagaatcatagcaccgtgacagtggaggaggccaaggccgagaaggagacggagctgtcactgcaaaaggagcagctgcagctcaagatcattgagattgaggatgaagctgagaagtggcagaaggagaaggaccgcatcaagagcttcaccaccaatgagaaggccatcctggagcagaacttccgggacctggtgcgggacctggagaagcaaaaggaggaagtgagggctgcgctggagcagcgggagcaggatgctgtggaccaagtgaaggtgatcatggatgctctggatgagagagccaaggtgctgcatgaggacaagcagacccgggagcagctgcatagcatcagcgactctgtgttgtttctgcaggaatttggtgcattgatgagcaattactctctccccccacccctgcccacctatcatgtcctgctggagggggagggcctgggacagtcactaggcaacttcaaggacgacctgctcaatgtatgcatgcgccacgttgagaagatgtgcaaggcggacctgagccgtaacttcattgagaggaaccacatggagaacggtggtgaccatcgctatgtgaacaactacacgaacagcttcgggggtgagtggagtgcaccggacaccatgaagagatactccatgtacctgacacccaaaggtggggtccggacatcataccagccctcgtctcctggccgcttcaccaaggagaccacccagaagaatttcaacaatctctatggcaccaaaggtaactacacctcccgggtctgggagtactcctccagcattcagaactctgacaatgacctgcccgtcgtccaaggcagctcctccttctccctgaaaggctatccctccctcatgcggagccaaagccccaaggcccagccccagacttggaaatctggcaagcagactatgctgtctcactaccggccattctacgtcaacaaaggcaacgggattgggtccaacgaagccccatgagctcctggcggaaggaacgaggcgccacacccctgctcttcctcctgaccctgctgctcttgccttctaagctactgtgcttgtctgggtgggagggagcctggtcctgcacctgccctctgcagccctctgccagcctcttgggggcagttccggcctctccgacttccccactggccacactccattcagactcctttcctgccttgtgacctcagatggtcaccatcattcctgtgctcagaggccaacccatcacaggggtgagataggttggggcctgccctaacccgccagcctcctcctctcgggctggatctgggggctagcagtgagtacccgcatggtatcagcctgcctctcccgcccacgccctgctgtctccaggcctatagacgtttctctccaaggccctatcccccaatgttgtcagcagatgcctggacagcacagccacccatctcccattcacatggcccacctcctgcttcccagaggactggccctacgtgctctctctcgtcctacctatcaatgcccagcatggcagaacctgcagcccttggccactgcagatggaaacctctcagtgtcttgacatcaccctacccaggcggtgggtctccaccacagccactttgagtctgtggtccctggagggtggcttctcctgactggcaggatgaccttagccaagatattcctctgttccctctgctgagataaagaattcccttaacatgatataatccacccatgcaaatagctactggcccagctaccatttaccatttgcctacagaatttcattcagtctacactttggcattctctctggcgatggagtgtggctgggctgaccgcaaaaggtgccttacacactgcccccaccctcagccgttgccccatcagaggctgcctcctccttctgattaccccccatgttgcatatcagggtgctcaaggattggagaggagacaaaaccaggagcagcacagtggggacatctcccgtctcaacagccccaggcctatgggggctctggaaggatgggccagcttgcaggggttggggagggagacatccagcttgggctttcccctttggaataaaccattggtctgtcaaaggggaaagcccaagctggacatctcccgtctcaacagccccaggcctatgggggctctggaaggatgggccagcttgcaggggttggggagggagacat

SEQ ID NO: 7 - DNA, 768 bp, Homo sapiens
  misc_feature: Template ID: 203351.6
cacagacaaaggggtaaaggccacaaggcgttaggttagtatgaacagggaaagggacatttttttttttaagaaaaataaaagcatcagtattgcaaagactttccatgatcctatacccacctcgaaagccccctctcaccacaggaagtgcactgaccattggaggcataaaagagatcctcaaagagcccgatcctcactctccttgcacagctcagcacgacctcagccatgagacttctcatcctggccctccttggcatctgctctctcactgcatacattgtggaaggtgtagggagtgaagtctcacataggaggacctgtgtgagcctcactacccagcgactgccagttagcagaatcaagacctacaccatcacggaaggctccttgagagcagtaatttttattaccaaacgtggcctaaaagtctgtgctgatccacaagccacgtgggtgagagacgtggtcaggagcatggacaggaaatccaacaccagaaataacatgatccagaccaagccaacaggaacccagcaatcgaccaatacagctgtgaccctgactggctagtagtctctggcaccctgtccgtctccagccagccagctcatttcactttacaccctcatggactgagattatactcaccttttatgaaagcactgcatgaataaaattattcctttgtatttttacttttaaatgtcttctgtattcacttatatgttctaattaataaattatttattattaagaata

SEQ ID NO: 8 - DNA, 2135 bp, Homo sapiens
  misc_feature: Template ID: 899156.22
gaagccaagactgagccggcggccgcggcgcagcgaacgagcagtgaccgtgctcctacccagctctgctccacagcgcccacctgtctccgcccctcggcccctcgcccggctttgcctaaccgccacgatgatgttctcgggcttcaacgcagactacgaggcgtcatcctcccgctgcagcagcgcgtccccggccggggatagcctctcttactaccactcacccgcagactccttctccagcatgggctcgcctgtcaacgcgcaggacttctgcacggacctggccgtctccagtgccaacttcattcccacggtcactgccatctcgaccagtccggacctgcagtggctggtgcagcccgccctcgtctcctctgtggccccatcgcagaccagagcccctcaccctttcggagtccccgccccctccgctggggcttactccagggctggcgttgtgaagaccatgacaggaggccgagcgcagagcattggcaggaggggcaaggtggaacagttatctccagaagaagaagagaaaaggagaatccgaagggaaaggaataagatggctgcagccaaatgccgcaaccggaggagggagctgactgatacactccaagcggagacagaccaactagaagatgagaagtctgctttgcagaccgagattgccaacctgctgaaggagaaggaaaaactagagttcatcctggcagctcaccgacctgcctgcaagatccctgatgacctgggcttcccagaagagatgtctgtggcttcccttgatctgactgggggcctgccagaggttgccaccccggagtctgaggaggccttcaccctgcctctcctcaatgaccctgagcccaagccctcagtggaacctgtcaagagcatcagcagcatggagctgaagaccgagccctttgatgacttcctgttcccagcatcatccaggcccagtggctctgagacagcccgctccgtgccagacatggacctatctgggtccttctatgcagcagactgggagcctctgcacagtggctccctggggatggggcccatggccacagagctggagcccctgtgcactccggtggtcacctgtactcccagctgcactgcttacacgtcttccttcgtcttcacctaccccgaggctgactccttccccagctgtgcagctgcccaccgcaagggcagcagcagcaatgagccttcctctgactcgctcagctcacccacgctgctggccctgtgagggggcagggaaggggaggcagccggcacccacaagtgccactgcccgagctggtgcattacagagaggagaaacacatcttccctagagggttcctgtagacctagggaggaccttatctgtgcgtgaaacacaccaggctgtgggcctcaaggacttgaaagcatccatgtgtggactcaagtccttacctcttccggagatgtagcaaaacgcatggagtgtgtattgttcccagtgacacttcagagagctggtagttagtagcatgttgagccaggcctgggtctgtgtctcttttctctttctccttagtcttctcatagcattaactaatctattgggttcattattggaattaacctggtgctggatattttcaaattgtatctagtgcagctgattttaacaataactactgtgttcctggcaatagtgtgttctgattagaaatgaccaatattatactaagaaaagatacgactttattttctggtagatagaaataaatagctatatccatgtactgtagtttttcttcaacatcaatgttcattgtaatgttactgatcatgcattgttgaggtggtctgaatgttctgacattaacagttttccatgaaaacgttttattgtgtttttaatttatttattaagatggattctcagatatttatatttttattttatttttttctaccttgaggtcttttgacatgtggaaagtgaatttgaatgaaaaatttaagcattgtttgcttattgttccaagacattgtcaataaaagcatttaagttgaatgcgaccaaccttgtgctcttttcattctggaagtcttgtaagtttctgaaaggtattatt

SEQ ID NO: 9 - DNA, 3286 bp, Homo sapiens
  misc_feature: Template ID: 013003.2
  unsure 2410, 2475, 2962: a, t, c, g, or other
gctggagatcaatgaagccgagtgaatgggggctgaatgtgcgagtccatagctgaagaggagcgccagatggtggaggaatacacttatttatgaaactgtcttgagttcttcttgaattgccagttttcagcctcctcatgcctccgtctcctttagacgacagggtagtagtggcactatctaggcccgtccgacctcaggatctcaacctttgtttagactctagttaccttggctctgccaacccaggcagtaacagccaccctcctgtcatcgccaccaccgttgtgtccctcaaggctgcgaatctgacgtatatgccctcatccagcggctctgcccgctcgctgaattgtggatgcagcagtgccagctgctgcactgtggcaacctacgacaaggacaatcaggcccaaacccaagccattgccgctggcaccaccaccactgccatcggaacctctaccacctgccctgctaaccagatggtcaacaataatgagaatacaggctctctaagtccatcaagtggggtgggcagccctgtgtcagggacccccaagcagctagccagcatcaaaataatctaccccaatgacttggcaaagaagatgaccaaatgcagcaagagtcacctgccgagtcagggccctgtcatcattgactgcaggcccttcatggagtacaacaagagtcacatccaaggagctgtccacattaactgtgccgataagatcagccggcggagactgcagcagggcaagatcactgtcctagacttgatttcctgtagggaaggcaaggactctttcaagaggatcttttccaaagaaattatagtttatgatgagaataccaatgagccaagccgagtgatgccctcccagccacttgcacatagtcctcgagtccctgaagagagaaggcaaagaacctctggtgttgaaaggtggacttagtagttttaagcagaaccatgaaaacctctgtgacaactccctccagctccaagagtgccgggaggtggggggcggcgcatccgcggcctcgagcttgctacctcagcccatccccaccacccctgacatcgagaacgctgagctcacccccatcttgcccttcctgttccttggcaatgagcaggatgctcaggacctggacaccatgcagcggctgaacatcggctacgtcatcaacgtcaccactcatcttcccctctaccactatgagaaaggcctgttcaactacaagcggctgccagccactgacagcaacaagcagaacctgcggcagtactttgaagaggcttttgagttcattgaggaagctcaccagtgtgggaaggggcttctcatccactgccaggctggggtgtcccgctccgccaccatcgtcatcgcttacttgatgaagcacactcggatgaccatgactgatgcttataaatttgtcaaaggcaaacgaccaattatctccccaaaccttaacttcatggggcagttgctagagttcgaggaagacctaaacaacggtgtgacaccgagaatccttacaccaaagctgatgggcgtggagacggttgtgtgacaatggtctggatggaaaggattgctgctctccattaggagacaatgaggaaggaggatggattctggttttttttctttctttttttttttgtagttgggagtaagtttgtgaatggaaacaaacttgtttaaacactttatttttaacaagtgtaagaagactataacttttgatgccattgagattcacctcccacaaactgacaaattaaggaggttaaagaagtaatttttttaagccaacaataaaaatataatacaacttgtttctcccccttttccttttaagctatttgtagagtttatgactaaatagtctgtgcaggttcatagaccgaagatactacacactttaaaccaattaaaaagaaccaaaagtaaatagaaaagacattgaatcaccaaggcctgggatcaacctgggctgtccacacagaaaacaaaaacccaaccaaaccaagccctgttgtgctcactggtgcaaagagaagatcagggcagcttaagtggtctaagaatccttcaggcattctttaaggagaaaaaggatacctttgattttgtgtgtttcatgctctggatttttttttttttccttctctgggtttaagagattttttttgaaatagtgaggaactgaccattatatgccttcactggcttcttgtgcaataatatgatgttttaagtgtgcaaacaagttagagctggcagctgaatgatagacaaatagtgcaaatttgccagcttggagatagaaaggaattcaacaatatatcaaatactttccttcccacctttttccttttttttttttntttctgatttgattctggttacagtgccataaaccttgttacatatgtatatcagaatgtaaganaaaaaaatttatttaaaaatatttttcgcaaaaaaaaaaaaatcttggtgtgtttctgttgattgtgtaaaaatttattttcattatataaatgaaactggtttaggatgtgtctttttttcccctctcttttaccttaactcaggttcaagcctttcttaagctctggtaacttgcatatataacaaagttgaaataaaacagatttttatatagggaaagagagatgaggaagggaacatatccagttttctcactgtgaaacagagttagcaaggaagtggaagagctccagtattgatctgcccagtcactgtcccttatattctcacaatgctgtcatcctctcctgcaaatatcatccttttgcattggggaaggcttgcattaagggggtcccatctgcctttgcgcccttggtgaccaaatccctgccagattgattggtgagaattcagtgatctccctagtggctatttgataaatncttaggacaatcttccatttagggatcttgatgttcctccccccacccccccaccccatagtcacttgctcacttggcatctttggtgacattaaccatgtaatgcgttgcagcaaattgctattgcctactcttttccccagcaaactgaaactcagctccatacatgtgtacagcttccttataacactgggttaatgcatagctgggttcccaattcactgttgatggagggttgggggtatgggaaaaacacaatgcaaatattttctgtgtttcattaaattaaaagtctagtgggacttggccataaggaagatttat

SEQ ID NO: 10 - DNA, 1257 bp, Homo sapiens
  misc_feature: Template ID: 237649.2
gacgagcgcggcgatatcatcatccatggtgagctggcggcgggtgtggacgggcggcggatcggcaaaggcgaggctctgtgctcgcggggcggacgcagagccgcgtttagtctatcgctgcggttgcgagcgctgtagggagcctgtgctgtgccgcgcagttaggcagcagcagccgcggagcagtagccgccgtgggagggagccatgaagcattacgaggtggagattctggacgcaaagacaagggagaagctgtgtttcttggacaaggtggagccccacgccaccattgcggagatcaagaacctcttcactaagacccatccgcagtggtaccccgcccgccagtccctccgcctggaccccaagggcaagtccctgaaggatgaggatgttctgcagaagctgcccgtgggcaccacggccacactgtacttccgggacctgggggcccagatcagctgggtgacggtcttcctaacagagtacgcggggccccttttcatctacctgctcttctacttccgagtgcccttcatctatggccacaaatatgactttacgtccagtcggcatacagtggtgcacctcgcctgcatctgtcactcattccactacatcaagcgcctgctggagacgctcttcgtgcaccgcttctcccatggcactatgcctttgcgcaacatcttcaagaactgcacctactactggggcttcgccgcgtggatggcctattacatcaatcaccctctctacactccccctacctacggagctcagcaggtgaaactggcgctcgccatctttgtgatctgccagctcggcaacttctccatccacatggccctgcgggacctgcggcccgctgggtccaagacgcggaagatcccataccccaccaagaaccccttcacgtggctcttcctgctggtgtcctgccccaactacacctacgaggtggggtcctggatcggtttcgccatcatgacgcagtgtctcccagtggccctgttctccctggtgggcttcacccagatgaccatctgggccaagggcaagcaccgcagctacctgaaggagttccgggactacccgcccctgcgcatgcccatcatccccttcctgctctgagcgctcacccctgctgaggctcagcccctcaacccggtggcattctgggggaggagtggggcccacagctctccagcacccggaataaagcccgcctgccccagtcaaaaaaaaaaacat

SEQ ID NO: 11 - DNA, 1299 bp, Homo sapiens
  misc_feature: Template ID: 269725.3
  unsure 19: a, t, c, g, or other
ctggctctgaccgcgctgncctgggcccgagagcccaggaggcgtgtctcagagaaaagatataagcggcccccggacgctaaagcggtgccagcggcggagtctccaactgggagagctgcagctgcccgagaggaggagaacgctgaggtcggtcggaccaacggacgcgctgaccgctgccaactggcagctgcgcgctgccttcctgctcgcgccgtgccactaaggtcactcccgcctccgagagcccagagccgagatggaaacggtccaggagctgatccccctggccaaggagatgatggcccagaagcgcaaggggaagatggtgaagctgtacgtgctgggcagcgtgctggccctcttcggcgtggtgctcggcctgatggagactgtgtgcagccccttcacggccgccagacgtctgcgggaccaggaggcagccgtggcggagctgcaggccgccctggagcgacaggctctccagaagcaagccctgcaggagaaaggcaagcagcaggacacggtcctcggcggccgggccctgtccaaccggcagcacgcctcctaggaactgtgggagaccagcggagtgggagggagacgcagtagacagagacagaccgagaaggaagggagagacagagggggcgcgcgcacaggagcctgactccgctgggagagtgcaggagcacgtgctgttttttatttggacttaacttcagagaaaccgctgacatctagaactgacctaccacaagcatccaccaaaggagtttgggattgagttttgctgctgtgcagcactgcattgtcatgacatttccaacactgtgtgaattatctaaatgcgtctaccattttgcactagggaggaaggataaatgctttttatgttattattattaattattacaatgaccaccattttgcattttgaaataaaaaactttttataccatatctcatgtaattcctgagaggtgtggtgtcctggggtgggaagcagggagggtgagcaggtgggcgatggtgatgggttcttacctgagcactgcagagggagcagcttcctgagggtcagacacttgcttcacacctaggaacagtatcagagggacacaattgaagtgtttccttcagagccagtgtttctctttggggtttgtgtgagttcaccagagtcggaagttgccaactttccttgtgcttgacttcaaactccttgaaagcagacaccacatattagtgaggctttgtattcccagcgcctgtaatcccatctactcaggaggc

SEQ ID NO: 12 - DNA, 2702 bp, Homo sapiens
  misc_feature: Template ID: 989992.6
gcgggagaacgataatgcaaagtgctatgttcttggctgttcaacacgacttgaagacccatggacaagagcgcaggcagtggccacaagagcgaggagaagcgagaaaagatgaaacggaccctgtgagtatggctttcttccctctcccgccaccccctgccccacactgcaagctgcaaacgcggtactttcgggctcgcctttgacgttaggaaactagcctgagcctatgcagggaaaaaaaatcgaaaaggtcaatttgttaagtaaggttaaatctgggtgatgctcgggtacagtttaagaaccgagggagacagttgatatgagggcggtggttgatgcgctaagaaattgcgggttggctttttgtcctcctgcattcaaaatgacatcagaatcctgcggctgaagcgcgtccccagcattcatacgttgcatgatgagttctcatcagcttacacagctactggaaggtgatgctcttgctggttctgaatatactcgtttaaaatccatttttgttttttaattatagagcagatctcacccagtccgaatgtggaacaaataattgttatgcagcgtctgcttaaaagaagtgtcgtaggtggggaaggaagagcgcaggggaatcagtcacccacctctttgtacagtctctggcgtggtccagaacctcctgctctaaagagagaagcgtgggccggctccagacagttccatgtctgtccttttcattaaagtgcaaaacgtctcggaattgtaattaaccttgcaaacaaactgatgccctttgtgagccagaaatagtgtctgccttttgaactaaattcattaacaattctttaaaataccctagtgattataggtagccctgcccttagttgtaaaactagtagatacggtcagattaatggacgaaactgctcagtacatgaggtttaaatgttaggtggataagacttatttgaagagttcttgctttgccttatgcggtttgtctctagttactgggtgactttatttggtaaaaatgcgttcagctgcagtagcatattcaagtgttgctagttagtaattatctttttaattttttgttttagtttaaaagattggaagacccgtttgagctacttcttacaaaattcctctactcctgggaagcccaaaaccggcaaaaaaagcaaacagcaagctttcatcaagtaagttgagaatcctgtgcttgcaaatatcaatagttagctgctgaactgaaaaggggaactctgatgtgcgtaagctaacatacagaacctctcttgcaggccttctcctgaggaagcacagctgtggtcagaagcatttgacgagctgctagccagcaaatgtaagttaactcttgagcttgagccattgctaacatcgcaaaagcctggaaaggctgcgtccacctaacaaaagagcagcttgcctgagggggattagactgcagtcactataggataaagcctgtttttctttcctttatttcccagggtttaacaaataaatgcatatattctctccaggtggggaagaaaatcagcctaaacaaattaaagtggcagttgcttatagttaaggttgagtcagtttttccattgcatacaatgttttcaagaggcttagttcccagagaatttatggctcccctataaatatttactttgcattgacagcaaagtacttatatttttgcagcagagtgccaacataagccttttgcctactggtatcttagtctttaaaaagctaaattttgagaattacaggtttgagcgaaatctagaaaattcatttagaaataattaaaatgtgagggataggagaaacataaggaatcatttggtctctcagttcttcacattctgcatgctctcttttctccccccttcagatggtcttgctgcattcagggcttttttaaagtcggaattctgtgaagaaaatattgaattctggctggcctgtgaagacttcaaaaaaaccaaatcaccccaaaagctgtcctcaaaagcaaggaaaatatatactgacttcatagaaaaggaagctccaaaagaggtaaggaaacaagttcctaatttcagcacaatctggacatctttagcacaaaagtgaaacaaagtaatcaaggacaaagcgggctaggaggggtaaaaagtccctccacgttgtagctttcagttatgttaaagttctcctgtgacttagctagtaaagctaatcacacataatttttattttttgttttcaaatactaaattttaatctttaactctgaataccaaataaacaacttttttgttttatttcagataaacatagattttcaaaccaaaactctgattgcccagaatatacaagaagctacaagtggctgctttacaactgcccagaaaagggtatacagcttgatggagaacaactcttatcctcgtttcttggagtcagaattctaccaggacttgtgtaaaaagccacaaatcaccacagagcctcatgctacatgaaatgtaaaagggagcccagaaatggaggacatttcattctttttcctgaggggaaggactgtgacctgccataaagactgaccttgaatttagcctgggtgttcaggaaacatcactcagaactattgattcaaagttgggtagtgaatcaggaagccagta

SEQ ID NO: 13 - DNA, 1382 bp, Homo sapiens
  misc_feature: Template ID: 989992.1
gcacgcccagccgcaaacagccggggctccagcgggagaacgataatgcaaagtgctatgttcttggctgttcaacacgactgcagacccatggacaagagcgcaggcagtggccacaagagcgaggagaagcgagaaaagatgaaacggacccttttaaaagattggaagacccgtttgagctacttcttacaaaattcctctactcctgggaagcccaaaaccggcaaaaaaaagcaaacagcaagctttcatcaagccttctcctgaggaagcacagctgtggtcagaagcatttgacgagctgctagccagcaaatatggtcttgctgcattcagggcttttttaaagtcggaattctgtgaagaaaatattgaattctggctggcctgtgaagacttcaaaaaaaccaaatcaccccaaaagctgtcctcaaaagcaaggaaaatatatactgacttcatagaaaaggaagctccaaaagagataaacatagattttcaaaccaaaactctgattgcccagaatatacaagaagctacaagtggctgctttacaactgcccagaaaagggtatacagcttgatggagaacaactcttatcctcgtttcttggagtcagaattctaccaggacttgtgtaaaaagccacaaatcaccacagagcctcatgctacatgaaatgtaaaagggagcccagaaatggaggacatttcattctttttcctgaggggaaggactgtgacctgccataaagactgaccttgaattcagcctgggtgttcaggaaacatcactcagaactattgattcaaagttgggtagtgaatcaggaagccagtaactgactaggagaagctggtatcagaacagcttccctcactgtgtacagaacgcaagaagggaataggtggtctgaacgtggtgtctcactctgaaaagcaggaatgtaagatgatgaaagagacaatgtaatactgttggtccaaaagcatttaaaatcaatagatctgggattatgtggccttaggtagctggttgtacatctttccctaaatcgatccatgttaccacatagtagttttagtttaggattcagtaacagtgaagtgtttactatgtgcaacggtattgaagttcttatgaccacagatcatcagtactgttgtctcatgtaatgctaaaactgaaatggtccgtgtttgcattgttaaaaatgatgtgtgaaatagaatgagtgctatggtgttgaaaactgcagtgtccgttatgagtgccaaaaatctgtcttgaaggcagctacactttgaagtggtctttgaatacttttaataaatttattttgataaataatattgaaaaaaaaaaaaaaagcggccgc

SEQ ID NO: 14 - DNA, 250 bp, Homo sapiens
  misc_feature: Template ID: 246772.4
ctgaaatgtagcctcccagcgctcgcgggacccgagacctggttagacgataatgtggcaccagagcagcaaagggtgatgctgctcagcaggtcaccctcagggcccaagaagtattttcccatccccgtggagcacctggaggaggagatccgtatcagatccgccgacgactgcaagcagtttcgggaggagttcaactcattgccatctggacacatacaaggaacttttgaactggcaaataaag

SEQ ID NO: 15 - DNA, 3086 bp, Homo sapiens
  misc_feature: Template ID: 1327183.6
  unsure 3070, 3078: a, t, c, g, or other
cggaattcggctcgagggcgactggagcggttccctcgcaggcggcgccattttgtgctaggagcctgataaaaccggcccggttctgtggaaagtgggcggcggagccagggtccctggaatggcggagactctgtcaggcctaggtgattctggagcggcgggcgcggcggctctgagctccgcctcgtcagagaccgggacgcggcgcctcagcgacctgcgagtgatcgatctgcgggcggagctgaggaaacggaatgtggactcgagcggcaacaagagcgttttgatggagcggctgaagaaggcaattgaagatgaaggtggtaatcctgacgaaattgaaattacctccgagggaaacaagaaaacatcaaagaggtctagcaaagggcgcaaaccagaagaagagggtgtggaagataacgggctggaggaaaactctggggatggacaggaggatgttgagaccagtctggagaacttgcaggacatcgacatcatggatatcagtgtgttggatgaagcagaaattgataatggaagcgttgcagattgtgtcgaagacgatgatgctgataacctccaggagtccctgtcggatagtagagagctagtcgagggggaaatgaaagagcttccggagcagcttcaggaacatgctatagaggacaaagaaactataaacaatttagatacttcatcatctgacttcactatattacaggaaattgaagagccatccctggagccagaaaatgagaaaatactcgacattttgggggaaacttgtaaatctgagccagtaaaagaagaaagttccgagctggagcagccatttgcacaggacacaagtagcgtggggccagacagaaagcttgcggaggaagaggacctatttgacagcgcccatccggaagagggtgatttagatttggccagcgagtcaacagcacacgctcagtcgagcaaggcagacagcctgttagcggtagtgaaaagggagcccgcggagcagccaggcgatggcgagaggacggactgtgagcctgtagggctagagccggcagttgagcagagtagtgcggcctccgagctcgcggaggcctctagcgaggagctcgcagaagcacccacggaagccccaagcccagaagccagagatagcaaagaagacgggaggaagtttgattttgacgcttgtaatgaagtccctccggctcctaaagagtcctcaaccagtgagggcgctgatcagaaaatgagttctcccgaagatgactcggatacaaaaaggctttccaaagaggaaaagggtcgcagcagttgtggtagaaatttctgggttagtggactctcttctacaaccagagctacagatttgaagaatcttttcagcaaatatgggaaggtggtgggcgccaaggttgtgacaaatgcccggagtcctggagctcgctgttacggttttgtcacgatgtccacagcagaagaggccacaaaatgcattaaccacctgcacaagacggagctccacggaaagatgatctccgtggagaaagccaaaaatgaacctgtgggaaagaaaacctctgacaaaagagacagtgacgggaaaaaggagaagtcgagcaacagtgacagatctacaaaccttaagagggatgataaatgtgacagaaaagatgatgctaagaagggtgacgacggaagtggagaaaagagtaaggaccaagatgatcagaaacctggcccctcagagcgatctcgagccacaaagtcaggaagtcgagggaccgaacggactgtagtaatggataaatccaaaggggtgcctgtgattagtgtaaaaacgtccgggtccaaagagagagcttccaaaagccaggatcgcaaatcagccagcagagagaagcggtccgtcgtgtcctttgataaggtcaaggagcctcggaagtcaagagactcagagtcccatagcagggtgcgtgaacgcagtgaacgcgaacaacgcatgcaggcgcagtgggagcgcgaggagcgtgagcggctggagattgcccgagagaggctggccttccagcgccagcggctggagcgggagcgcatggagcgggaacggctggagcgcgaacgcatgcacgtggagcacgagcgcaggcgcgagcaggagcgcatccaccgtgagcgcgaggagctgaggcgccagcaggaactgcgctatgagcaggagcggcggcccgcggtgcggcggccctacgacctggaccggcgagatgatgcctattggccggaagccaagcgggccgccctggatgagcgctaccattctgactttaaccgccaggaccgcttccacgactttgaccacagggaccgcggccgctaccccgaccactcggtggacaggagagaaggttcaaggtcaatgatgggagaacgagaaggacagcattacccagaacgccatggaggaccagagcgccacggccgggactcccgcgatggctgggggggctatggctctgacaagaggatgagcgagggccgggggctgcctcctccccccaggggcagacgtgactggggggaccatggccgaagagaggatgaccggtcatggcagggcacggccgacgggggcatgatggacagggatcacaagaggtggcaaggtggcgagagaagcatgtccggtcactccgggcctggccacatgatgaaccgaggaggaatgtcagggcgcggcagctttgccccaggcggggcctcccggggccaccccatcccacacggtggcatgcagggcgggtttggaggccagagccgggggagcaggcccagcgatgcccgcttcactcgccgctactgagtacttggaatcctgtgtcctgtctcgtggcaacaaggctatgttctgttaggagttaccttaaactgtgtaaaaatatttttttttaatctgctgccatattgtagctcaatacaatgtgaatttgtttttcgttttggggttttttttttttgtaataaatgtgtttccgttcacataccctttaaaaaaaanaaaaaaancaaaaaca

SEQ ID NO: 16 - DNA, 1716 bp, Homo sapiens
  misc_feature: Template ID: 127112.53
aaagtgaaggactaagctggctctaaccacacacacacactgcgctgcaatgctcacaccttggggaaaggacttctcattattaaaaaccaaggactcactggcggacgggcaggccttgtgttttgggaatggctgatggcgccctggcccttccgtagcgaagatgcagctcgtaggcccaggcctcgaggttgcctcccctgccaatctcctcacttccctggtccgtgcacacctggactcagggcccagcactgccaaactggactactccaaggtgaggtcccaccccgtgtctgccttggggaggtctatgagcacatgcagtgcctttgtgcgtgttaggagagctaccccctctggaaggactgaatgagaaaggaggtttaaaaaagaaagaaagaaaagcgactccctccagttcgacagatcaaagagaggatccccctctcggctgaccagatgggaaaatgcaccccctcaggcaggtggccaattagaaaaatatgtccttttggcagctgcagccctgggttaatatgtgagacttggcaagtgagagcctgggcaggatctcagatccactcccactcccgggatctggcatccaagtgtctgacacagccatacgtggcagtgggtgtaggagcctgcctggggtgctgaccccactggaccgtcttcctagttccaggagctggtgctgccccactttgggaaggaagatgctggggatgtacagcagttctacgacctgctctccggttctctggaggtcatccgcaagtgggcggagaagatccctggctttgctgagctgtcaccggctgaccaggacctgttgctggagtcggccttcctggagctcttcatcctccgcctggcgtacaggtgagagccactgactgtctgcccagcccctttccctgatacacctgcctgtgaaccaccctgatcgctcttcgtgcccatctgcctgccaggtctaagccaggcgagggcaagctcatcttctgctcaggcctggtgctacaccggctgcagtgtgcccgtggcttcggggactggattgacagtatcctggccttctcaaggtccctgcacagcttgcttgtcgatgtccctgccttcgcctgcctctctgcccttgtcctcatcaccgaccggcatgggctgcaggagccgcggcgggtggaggagctgcagaaccgcatcgccagctgcctgaaggagcacgtggcagctgtggcgggcgagccccagccagccagctgcctgtcacgtctgttgggcaaactgcccgagctgcggaccctgtgcacccagggcctgcagcgcatcttctacctcaagctggaggacttggtgccccctccacccatcattgacaagatcttcatggacacgctgcccttctgacccctgcctgggaacacgtgtgcacatgcgcactctcatatgccaccccatgtgcctttagtccacggacccccagagcacccccaagcctgggcttgagctgcagaatgactccaccttctcacctgctccaggaggtttgcagggagctcaagcccttggggagggggatgccttcatgggggtgaccccacgatttgtcttatccccccaagcctggccccggcctttatgtttttgtaagataaccgttttacacatagcgcggctgtaataagccagtgctgctgtaat

SEQ ID NO: 17 - DNA, 2638 bp, Homo sapiens
  misc_feature: Template ID: 127112.19
ggaggctacgaaacttgggggagtgcacagaagaacttcgggagcgcacgcgggaccagggaccaggctgagactcggggcgccagtccgggcaggggcagcgggagccggccgggtagggtgcagcctgaggcttgttcagaagaacaggtgcaagccacattgttgccaagacctgcctgaagccggattctccccactgcctccttcaaccccgcctcttcctcctcctgtgggactgctcccccctcctgtgaggctagatagatgccctgtatccaagcccaatatgggacaccagcaccgagtccgggaccccgtgaccacctggcaagcgaccccctgacccctgagttcatcaagcccaccatggacctggccagccccgaggcagcccccgctgcccccactgccctgcccagcttcagcaccttcatggacggctacacaggagagtttgacaccttcctctaccagctgccaggaacagtccagccatgctcctcagcctcctcctcggcctcctccacatcctcgtcctcagccacctcccctgcctctgcctccttcaagttcgaggacttccaggtgtacggctgctaccccggccccctgagcggcccagtggatgaggccctgtcctccagtggctctgactactatggcagcccctgctcggccccgtcgccctccacgcccagcttccagccgccccagctctctccctgggatggctccttcggccacttctcgcccagccagacttacgaaggcctgcgggcatggacagagcagctgcccaaagcctctgggcccccacagcctccagccttcttttccttcagtcctcccaccggccccagccccagcctggcccagagccccctgaagttgttcccctcacaggccacccaccagctgggggagggagagagctattccatgcctacggccttcccaggtttggcacccacttctccacaccttgagggctcggggatactggatacacccgtgacctcaaccaaggcccggagcggggccccaggtggaagtgaaggccgctgtgctgtgtgtggggacaacgcttcatgccagcattatggtgtccgcacatgtgagggctgcaagggcttcttcaagcgcacagtgcagaaaaacgccaagtacatctgcctggctaacaaggactgccctgtggacaagaggcggcgaaaccgctgccagttctgccgcttccagaagtgcctggcggtgggcatggtgaaggaagttgtccgaacagacagcctgaaggggcggcggggccggctaccttcaaaacccaagcagcccccagatgcctcccctgccaatctcctcacttccctggtccgtgcacacctggactcaggggcccagcactgccaaactggactactccaagttccaggagctggtgctgccccactttgggaaggaagatgctggggatgtacagcagttctacgacctgctctccggttctctggaggtcatccgcaagtgggcggagaagatccctggctttgctgagctgtcaccggctgaccaggacctgttgctggagtcggccttcctggagctcttcatcctccgcctggcgtacaggtctaagccaggcgagggcaagctcatcttctgctcaggcctggtgctacaccggctgcagtgtgcccgtggcttcggggactggattgacagtatcctggccttctcaaggtccctgcacagcttgcttgtcgatgtccctgccttcgcctgcctctctgcccttgtcctcatcaccgaccggcatgggctgcaggagccgcggcgggtggaggagctgcagaaccgcatcgccagctgcctgaaggagcacgtggcagctgtggcgggcgagccccagccagccagctgcctgtcacgtctgttgggcaaactgcccgagctgcggaccctgtgcacccagggcctgcagcgcatcttctacctcaagctggaggacttggtgccccctccacccatcattgacaagatcttcatggacacgctgcccttctgacccctgcctgcctgggaacacgtgtgcacatgcgcactctcatatgccaccccatgtgcctttagtccacggacccccagagcacccccaagcctgggcttgagctgcagaatgactccaccttctcacctgctccaggaggtttgcagggagctcaagcccttggggagggggatgccttcatgggggtgaccccacgatttgtcttatcccccccagcctggccccggcctttatgttttttgtaagataaaccgtttttaacacatagcgccgtgctgtaaataagcccagtgctgctgtaaatacaggaagaaagagcttgaggtgggagcggggctgggaggaagggatgggccccgccttcctgggcagcctttccagcctcctgctggctctctcttcctaccctccttccacatgttgtacataaactgtcactctaggaagaagacaaatgacagattctgacatttatatttgtgtattttcctggatttatagtatgtgacttttctgattaatatatttaatatattgaataaaaaatagacatgtagttggaactgaaaa

SEQ ID NO: 18 - DNA, 1429 bp, Homo sapiens
  misc_feature: Template ID: 336965.2
gaaggactggggaagactggatgagaagggtagaagagggtgggtgtgggatggggaggggagagtggaaaggccctgggcagaccctggcagaaggggcacggggcagggtgtgagttccccactagcagggccaggtgagctatggtgctgcacctactgctcttcttgctgctgaccccacagggtgggcacagctgccaggggctggagctggcccgggaacttgttctggccaaggtgagggccctgttcttggatgccttggggccccccgcggtgaccagggaaggtggggaccctggagtcaggcggctgccccgaagacatgccctggggggcttcacacacaggggctctgagcccgaggaagaggaggatgtctcccaagccatccttttcccagccacagatgccagctgtgaggacaagtcagctgccagagggctggcccaggaggctgaggagggcctcttcagatacatgttccggccatcccagcatacacgcagccgccaggtgacttcagcccagctgtggttccacaccgggctggacaggcagggcacagcagcctccaatagctctgagcccctgctaggcctgctggcactgtcaccgggaggacccgtggctgtgcccatgtctttgggccatgctccccctcactgggccgtgctgcacctggccacctctgctctctctctgctgacccaccccgtcctggtgctgctgctgcgctgtcccctctgtacctgctcagcccggcctgaggccacgcccttcctggtggcccacactcggaccagaccacccagtggaggggagagagcccgacgctcaactcccctgatgtcctggccttggtctccctctgctctgcgcctgctgcagaggcctccggaggaaccggctgcccatgccaactgccacagagtagcactgaacatctccttccaggagctgggctgggaacggtggatcgtgtaccctcccagtttcatcttccactactgtcatggtggttgtgggctgcacatcccaccaaacctgtcccttccagtccctggggctccccctaccccagcccagccctactccttgctgccaggggcccagccctgctgtgctgctctcccagggaccatgaggcccctacatgtccgcaccacctcggatggaggttactctttcaagtatgagacagtgcccaaccttctcacgcagcactgtgcttgtatctaagggtggggggtcttccttcttaatcccatggctggtggccacgcccccaccatcatcagctgggaggaaaggcagagttgggaaatagatggctcccactcctccctcctttcacttctctgcctatgggctaccctccccaccccacttctatctcaataaagaacacagtgcatatgacttg

SEQ ID NO: 19 - DNA, 7819 bp, Homo sapiens
  misc_feature: Template ID: 253946.17
  unsure 4012-4050: a, t, c, g, or other
gcgccccgccccgccgcgggactggggtggcgcgctacctctgcggagaaggatctgacagtgttccggagccggggcgagcagccaaaaggcccgcggagtcgcgctgggccgccccggcgcagctgaaccgggggccgcgcctgccaggccgacgggtctggcccagcctggcgccaaggggttcgtgcgctgtggagacgcggagggtcgaggcggcgcggcctgagtgaaacccaatggaaaaagcatgacatttagaagtagaagacttagcttcaaatccctactccttcacttactaattttgtgatttggaaatatccgcgcaagatgttgacgttgcagacttggctagtgcaagccttgtttattttcctcaccactgaatctacaggtgaacttctagatccatgtggttatatcagtcctgaatctccagttgtacaacttcattctaatttcactgcagtttgtgtgctaaaggaaaaatgtatggattattttcatgtaaatgctaattacattgtctggaaaacaaaccattttactattcctaaggagcaatatactatcataaacagaacagcatccagtgtcacctttacagatatagcttcattaaatattcagctcacttgcaacattcttacattcggacagcttgaacagaatgtttatggaatcacaataatttcaggcttgcctccagaaaaacctaaaaatttgagttgcattgtgaacgaggggaagaaaatgaggtgtgagtgggatggtggaagggaaacacacttggagacaaacttcactttaaaatctgaatgggcaacacacaagtttgctgattgcaaagcaaaacgtgacacccccacctcatgcactgttgattattctactgtgtattttgtcaacattgaagtctgggtagaagcagagaatgcccttgggaaggttacatcagatcatatcaattttgatcctgtatataaagtgaagcccaatccgccacataatttatcagtgatcaactcagaggaactgtctagtatcttaaaattgacatggaccaacccaagtattaagagtgttataatactaaaatataacattcaatataggaccaaagatgcctcaacttggagccagattcctcctgaagacacagcatccacccgatcttcattcactgtccaagaccttaaaccttttacagaatatgtgtttaggattcgctgtatgaaggaagatggtaagggatactggagtgactggagtgaagaagcaagtgggatcacctatgaagatagaccatctaaagcaccaagtttctggtataaaatagatccatcccatactcaaggctacagaactgtacaactcgtgtggaagacattgcctccttttgaagccaatggaaaaatcttggattatgaagtgactctcacaagatggaaatcacatttacaaaattacacagttaatgccacaaaactgacagtaaatctcacaaatgatcgctatctagcaaccctaacagtaagaaatcttgttggcaaatcagatgcagctgttttaactatccctgcctgtgactttcaagctactcaccctgtaatggatcttaaagcattccccaaagataacatgctttgggtggaatggactactccaagggaatctgtaaagaaatatatacttgagtggtgtgtgttatcagataaagcaccctgtatcacagactggcaacaagaagatggtaccgtgcatcgcacctatttaagagggaacttagcagagagcaaatgctatttgataacagttactccagtatatgctgatggaccaggaagccctgaatccataaaggcataccttaaacaagctccaccttccaaaggacctactgttcggacaaaaaaagtagggaaaaacgaagctgtcttagagtgggaccaacttcctgttgatgttcagaatggatttatcagaaattatactatattttatagaaccatcattggaaatgaaactgctgtgaatgtggattcttcccacacagaatatacattgtcctctttgactagtgacacattgtacatggtacgaatggcagcatacacagatgaaggtgggaaggatggtccagaattcacttttactaccccaaagtttgctcaaggagaaattgaagccatagtcgtgcctgtttgcttagcattcctattgacaactcttctgggagtgctgttctgctttaataagcgagacctaattaaaaaacacatctggcctaatgttccagatccttcaaagagtcatattgcccagtggtcacctcacactcctccaaggcacaattttaattcaaaagatcaaatgtattcagatggcaatttcactgatgtaagtgttgtggaaatagaagcaaatgacaaaaagccttttccagaagatctgaaatcattggacctgttcaaaaaggaaaaaattaatactgaaggacacagcagtggtattggggggtcttcatgcatgtcatcttctaggccaagcatttctagcagtgatgaaaatgaatcttcacaaaacacttcgagcactgtccagtattctaccgtggtacacagtggctacagacaccaagttccgtcagtccaagtcttctcaagatccgagtctacccagcccttgttagattcagaggagcggccagaagatctacaattagtagatcatgtagatggcggtgatggtattttgcccaggcaacagtacttcaaacagaactgcagtcagcatgaatccagtccagatatttcacattttgaaaggtcaaagcaagtttcatcagtcaatgaggaagattttgttagacttaaacagcagatttcagatcatatttcacaatcctgtggatctgggcaaatgaaaatgtttcaggaagtttctgcagcagatgcttttggtccaggtactgagggacaagtagaaagatttgaaacagttggcatggaggctgcgactgatgaaggcatgcctaaaagttacttaccacagactgtacggcaaggcggctacatgcctcagtgaaggactagtagttcctgctacaacttcagcagtacctataaagtaaagctaaaatgattttatctgtgaattcagattttaaaaagtcttcactctctgaagatgatcatttgcccttaaggacaaaaatgaactgaagtttcacatgagctatttccattccagaatatctgggattctactttaagcactacataaactgactttatcctcagactagctgaatgattttgtgctgtttcaggatgtttgcactgaagaaaaacagaaagcttatctgaaatttataaaactttttgttttgctacatagaaaacagaaggtatttgaataataagcagtgatatgcttagtgagcacagctatactgattttgattagaatagtcatcagagtggcttagggacagttaatataaaagaggagcaaggtgtagaccatcatctacttctgctaaaataacttaaaaagaggtccataggccataactacatgagcccagcttttgtaatctgacaaaaaaatgaggagcagcttcgtgtatatcagtgtacacggtattccttaggtcccttccattggtagtgatgctgcgagttattactggagaaaaggaattctagagctttaacttggcagattaaaagtactcattttttattcatcaataattagtaatctcactagttttcaaaaatttgcatattattgacaacctctttgaagatgcatttcacaaactcaacagagtgccatgataagagctagggatcccccaaactatctcaagcatctaaaaaattgccatttttaaaggcttaaattgtagtagtaaaggggaaaacaggaagtagtagtaaaggggaaaaaaaaccaataaagcatctaaaaaattggcatgttaaaaggcttaaattgctannnnnnnnnnnnnnnnnnnnnnnnnnnnnnnnnnnnnnncacacacatatcattgacttttcttaagacttcagagtactgggtagatgaacactttatacagtatatatcttcagcttaaatttgttttgagtattttttttatttttaaataagtaggcaaagatttaaatttttttatttttagtaaatgtttgaggcacactaagacaacttgggcaatatttgccaaaacaaaacagaaccccaaaaaatgtacatcttgttcttagcaaatatcattattgtagagacacttaataaagagatggtattttaatgtctgcagttctgaggtagggtggaacttagttctacattgtgatttaggaatttttaaaaccttttttcttcaagggagaagtgacccaggcctcgagtttagtgctaaagccgctagtgtacttatgctgtcccctaaccaccacgtgcgatatggaagcagatgctaaatataggggttttcttagaaagtaagaggaaattagcaagcgttattagtgattgactactgctatcaagtgaattcaaaggaaacaggtttttatgccatatttaagttacagaaaccaggcatgcttagaatagtttctagaggttattggagaatagaaagctaagaaaacttggtatacatttacaatggaaatataattacactttttactctcagaatattgttcacattagacttcctgtttatcttttatattcttgcatttatataatgcctcatcctttcaaagttctttcacatattatatgatcttctttatgaaaaaaatagatgtttcattctgatatattcagtttcccactttaggcaaaagtagattaatagaatgacgaattcaaagtagatgaggaaaatcaggcacagagaagtaaaggtagggatagacccaaatttacacaacaagataatgacatctccagcttttaagttgatcatcaaaggctgggctggatttgtcttgctgtatgtgtcaggaaatttatacctattacattttccattttctcaaaatttaagtcacatgactaatatttagctgcaactttcctcataacaaatagtgtcatgaagaatgttgtagtgtgaagtttgtacatttcagggtcagatatacaatatgaactcttaatctacaggaatgagaatggaggatcattgaaggccatgatataaacaaatttgcatgttgaagcctgtataaaacatggtacagtgagtgaatatacccccatccccaagaacactttatacatattaaatggatatatgattactgtgcaaaaattcattctggaaatgaacatatatttgagcactaatatgtaatgtacacctgccctaaggagaaaataaattataaaactttttacattcaaaattactttcccaagcatgtcttagaataatctatgtgttgatgcatgtaaattgtactttaggtaggcaaagaaatctggttatttatgtaaaaactagtctaataaagttagttagtggctttatcactttaaatctttagtgtccaaaagtggtgtttaaagtaatagcacatcagaaaaccttgtctggacaaaactagttcactcactgcttctgcacctgcagttgctccctttagggttataaaataatgacccaaatgttacatgtgttgatattataacttgtcagttactgatgtctgtggtatcctaccctcatctctgaaagggataatactgaataattattagaaaactataaaacttcacactttgtaccattaaaacctaaaattttaatcttgtccttttttactatggatcagtcggcactcgggaacagcagcaaggaaaaaaagcaaatttcattcacatgttctgtgttcatacctcttctctacctaattgttcatttaaatttcagccttattccttgataagggattttaccacatgaagtcatccagtgaccctagctcttattgtgaagttagtggagtatacttagaaatgttacaactttaaaatgttacaaaacattcattaaagctcatatttaaagtagagcatctagtttgagaaatagaaatcaattattaaagatgtcttttttctacccatttaactagttaaaaccatgacatgtaaatgtagaagtagaataatcatagaattccctaaaatatttctgtttactaacatatattgaccaagtacatcaagcaggagagatcttccttcattctgttatagtccacatcattctaattttgctcagttgttattaagagcatattcctaaaccatacacttttgtttcaataaagttttattttgttgagatgaataaaataacaaagttataagctgcataagacaaaagttcaattgttcaaaaaaaatttactgggatagctttctattacaggtattgttagattatattgtgctgataagattactttctaaaaaatttgtacttttctgtaaattaaaagaatatggagtcataaaatggcaagtgttttaggattagcctaaaattggacattgtcattgatttcaaagaaggtatgaactagcagtcttacagcctaattcttctttggactggtccttggcagcagttccttttcagactcgataaacagaattcagatgatgtaagtcaaaacaaaactttacaaagccaagcgtattatcttttgcattaacctatttttttccatcatacatgctactagtatgtgcattagcatgatattctcatatacattgcattaaaaattaaaaggtggcagctcagggtgagctcttctgttgctcatttgttcctaaatttttaagggctttttctcagtcaatagtttgtacaaactggttagtttaacttcattacccatttcattaaagttgatgggtcgtgtgatgagatgcatttaaggccgatagtgatagatgttttttttatttcttgaacacaggctttgtctgaatgatgttcttttatctcttgaacacaagctttgaatgataactacaggttttaagtgctgttacattaataccataatgtgatgtgttagaaacaaagggatatttcaaaggtagatatttgaaaattctctagtctcaatatgtatgtgtattgaatatactctaaaaataaatgtgcaatttgctagtaggacaatgcagtgactgactagcattaggtatgtttcttttatatcctagctatgtcccactttcttctaagtgcaatcctttcatgttcacttgctgttttaccccatctactctaacttcatttggaaggcttgtctagagtatagcatgtatttttacctttgcagtgaattgcatgtgctaattgtaaccacagctatttttatgttgacataactccaaatgttatattaaatgttctattatatattagctctaatcccttaagtaaattttaagaaataaatacttgttcaaattttttttctgtatgtggttactatcatctgactatgcatatttgtaacagcatttatcattagtggtgttagctaaataagcatcttagtgtaaatgagatgcttcgtgtgggttttgtgacattttaaatgacataatggaatgtgatttaaaagaaaaccagtacactatcttggtcttaataacatagaatggagatggcaaatttatccactagttttccagatttactatttaatagctgaggtctgaaatcgtagcatcctccctcctagtggacatt

SEQ ID NO: 20 - DNA, 1711 bp, Homo sapiens
  misc_feature: Template ID: 284616.2
  unsure 1706: a, t, c, g, or other
tgtttttataaaagtccggccgcggcagaaacttcagttgttggctgcggcagcaggtagcaaagtgacgccgagggcctgagtgctccagtagccaccgcatctggagaaccagcggttaccatggaggggatcagtatatacacttcagataactacaccgaggaaatgggctcaggggactatgactccatgaaggaaccctgtttccgtgaagaaaatgctaatttcaataaaatcttcctgcccaccatctactccatcatcttcttaactggcattgtgggcaatggattggtcatcctggtcatgggttaccagaagaaactgagaagcatgacggacaagtacaggctgcacctgtcagtggccgacctcctctttgtcatcacgcttcccttctgggcagttgatgccgtggcaaactggtactttgggaacttcctatgcaaggcagtccatgtcatctacacagtcaacctctacagcagtgtcctcatcctggccttcatcagtctggaccgctacctggccatcgtccacgccaccaacagtcagaggccaaggaagctgttggctgaaaaggtggtctatgttggcgtctggatccctgccctcctgctgactattcccgacttcatctttgccaacgtcagtgaggcagatgacagatatatctgtgaccgcttctaccccaatgacttgtgggtggttgtgttccagtttcagcacatcatggttggccttatcctgcctggtattgtcatcctgtcctgctattgcattatcatctccaagctgtcacactccaagggccaccagaagcgcaaggccctcaagaccacagtcatcctcatcctggctttcttcgcctgttggctgccttactacattgggatcagcatcgactccttcatcctcctggaaatcatcaagcaagggtgtgagtttgagaacactgtgcacaagtggatttccatcaccgaggccctagctttcttccactgttgtctgaaccccatcctctatgctttccttggagccaaatttaaaacctctgcccagcacgcactcacctctgtgagcagagggtccagcctcaagatcctctccaaaggaaagcgaggtggacattcatctgtttccactgagtctgagtcttcaagttttcactccagctaacacagatgtaaaagacttttttttatacgataaataacttttttttaagttacacatttttcagatataaaagactgaccaatattgtacagtttttattgcttgttggatttttgtcttgtgtttctttagtttttgtgaagtttaattgacttatttatataaattttttttgtttcatattgatgtgtgtctaggcaggacctgtggccaagttcttagttgctgtatgtctcgtggtaggactgtagaaaagggaactgaacattccagagcgtgtagtgaatcacgtaaagctagaaatgatccccagctgtttatgcatagataatctctccattcccgtggaacgtttttcctgttcttaagacgtgattttgctgtagaagatggcacttataaccaaagcccaaagtggtatagaaatgctggtttttcagttttcaggagtgggttgatttcagcacctacagtgtacagtcttgtattaagttgttaataaaagtacatgttaaacttaaaanaaaaa

SEQ ID NO: 21 - DNA, 4569 bp, Homo sapiens
  misc_feature: Template ID: 401269.21
  unsure 43-44, 73, 119, 136, 139, 143, 153, 156, 159, 181-182: a, t, c, g, or other
gccccgccctttctcggcccccggaggttgacggggtgaaggnnggggaaccgaggtggggagtccgccaganctcccagactgcgagcacgcgagccgccgcagccgtcacccgcgcngcgtcaaggctcccggnacncgcnctcctctganccntcncctctgtgcgtttgcccctctnnccctcctccgccgaccgagcagtgacttaagcaacggagcgcggtgaagctcatttttctccttcctcgcagccgcgccagggagctcgcggcgcggcggcccctgtcctccggcccgagatgaatcctgcggcagaagccgagttcaacatcctcctggccaccgactcctacaaggttactcactataaacaatatccacccaacacaagcaaagtttattcctactttgaatgccgtgaaaagaagacagaaaactccaaattaaggaaggtgaaatatgaggaaacagtattttatgggttgcagtacattcttaataagtacttaaaaggtaaagtagtaaccaaagagaaaatccaggaagccaaagatgtctacaaagaacatttccaagatgatgtctttaatgaaaagggatggaactacattcttgagaagtatgatgggcatcttccaatagaaataaaagctgttcctgagggctttgtcattcccagaggaaatgttctcttcacggtggaaaacacagatccagagtgttactggcttacaaattggattgagactattcttgttcagtcctggtatccaatcacagtggccacaaattctagagagcagaagaaaatattggccaaatatttgttagaaacttctggtaacttagatggtctggaatacaagttacatgattttggctacagaggagtctcttcccaagagactgctggcataggagcatctgctcacttggttaacttcaaaggaacagatacagtagcaggacttgctctaattaaaaaatattatggaacgaaagatcctgttccaggctattctgttccagcagcagaacacagtaccataacagcttgggggaaagaccatgaaaaagatgcttttgaacatattgtaacacagttttcatcagtgcctgtatctgtggtcagcgatagctatgacatttataatgcgtgtgagaaaatatggggtgaagatctaagacatttaatagtatcgagaagtacacaggcaccactaataatcagacctgattctggaaaccctcttgacactgtgttaaaggttttggagattttaggtaagaagtttcctgttactgagaactcaaagggttacaagttgctgccaccttatcttagagttattcaaggggatggagtagatattaataccttacaagagattgtagaaggcatgaaacaaaaaatgtggagtattgaaaatattgccttcggttctggtggaggtttgctacagaagttgacaagagatctcttgaattgttccttcaagtgtagctatgttgtaactaatggccttgggattaacgtcttcaaggacccagttgctgatcccaacaaaaggtccaaaaagggccgattatctttacataggacgccagcagggaattttgttacactggaggaaggaaaaggagaccttgaggaatatggtcaggatcttctccatactgtcttcaagaatggcaaggtgacaaaaagctattcatttgatgaaataagaaaaaatgcacagctgaatattgaactggaagcagcacatcattaggctttatgactgggtgtgtgttgtgtgtatgtaatacataatgtttattgtacagatgtgtggggtttgtgttttatgatacattacagccaaattatttgttggtttatggacatactgccctttcattttttttcttttccagtgtttaggtgatctcaaattaggaaatgcatttaaccatgtaaaagatgagtgctaaagtaagctttttagggccctttgccaataggtagtcattcaatctggtattgatcttttcacaaataacagaactgagaaacttttatatataactgatgatcacataaaacagatttgcataaaattaccatgattgctttatgtttatatttaacttgtatttttgtacaaacaagattgtgtaagatatatttgaagtttcagtgatttaacagtctttccaacttttcatgatttttatgagcacagactttcaagaaaatacttgaaaataaattacattgccttttgtccattaatcagcaaataaaacatggccttaacaaagttgtttgtgttattgtacaatttgaaaattatgtcgggacataccctatagaattactaaccttactgccccttgtagaatatgtattaatcattctacattaaagaaaataatggttcttactggaatgtctaggcactgtacagttattatatatcttggttgttgtattgtaccagtgaaatgccaaatttgaaaggcctgtactgcaattttatatgtcagagattgcctgtggctctaatatgcacctcaagattttaaggagataatgtttttagagagaatttctgcttccactatagaatatatacataaatgtaaaatacttacaaaagtggaagtagtgtattttaaagtaattacacttctgaatttatttttcatattctatagttggtatgacttaaatgaattactggagtgggtagtgagtgtacttaaatgtttcaattctgttatattttttattaagtttttaaaaaattaaattggatattaaattgtatggacatcatttattaattttaaactgaatgccctcaataagtaatactgaagcacattcttaaatgaagataaattatctccaatgaaaagcatgacatgtgtttcaatagaagaatcttaagttggctaaattcaaagtgcttgacatcaaaatgttctagagtgattagctactagattctgaatcatacatcacatctgactagagaccagtttctttcgaatgattcttttatgtatgtagatctgttcttctgaggcagcggttggccaactatagcccaaaggccaaatttggacttctttttataaatgcagattgtctatggctgctttcccactactccagcctaaggtaaacagctgcaatagaagccaaatgagaatcgcaaagcccaaaatgtttattaacctgccctttacacaaaattacacaaaaagtttcctgatctctgttctaagaaaaggagtgtgccttgcatttaaaaggaaatgttggtttctagggaagggaggaggctaaataattgatacggaattttcctcttttgtcttcttttttctcacttaagaatccgatactggaagactgatttagaaaagtttttaacatgacattaaatgtgaaattttaaaaattgaaaagccataaatcatctgttttaaatagttacatgagaaaatgatcactagaataacctaattagaagtgttatcttcattaaatgttttttgtaagtggtattagaaagaatatgtttttcagatggttctttaaacatgtagtgagaacaataagcattattcacttttagtaagtcttctgtaatccatgatataaaataattttaaaatgattttttaatgtatttgagtaaagatgagtagtattaagaaaaacacacatttcttcacaaaatgtgctaaggggcgtgtaaagaatcaaaagaaactattaccaataatagttttgataatcacccataattttgtgtttaaacattgaaattatagtacagacagtattctctgtgttctgtgaatttcagcagcttcagaatagagtttaatttagaaatttgcagtgaaaaaagctatctctttgttcacaaccataaatcaggagatggagattaattctattggctcttagtcacttggaactgattaattctgactttctgtcactaagcacttggtatttggccatctccattctgagcaccaaacggttaacacgaatgtccactagaactctgctgtgtgtcacccttaaatcagtctaaatcttccagacaaaagcaaatggcatttatggatttaagtcattagattttcaactgacattaattaatccctcttgattgattatatcatcaagtatttatatcttaaataggaggtaggatttctgtgttaagactcttatttgtaccctataattaaagtaaaatgttttttatgagtatcccttgttttcccttcttaaattgttatcaaacaatttttataatgaaatctatcttggaaaattagaaagaaaaatggcaaggtatttattgttctgtttgccataatttagaactcacacttaagtattttgtagttttacattcctttttaacccattcagtggagaatgtcagcttttctcccaagttgtatgttaagtctattctaatatgtactcaacatcaagttataaacatgtaataaacatggaaataaagtttagctctattaaaaaaa

SEQ ID NO: 22 - DNA, 729 bp, Homo sapiens
  misc_feature: Template ID: 401269.14
gttgactcaagtaatcttagatatttatagctagttttttctcactttctctcatttccttcactccccgaatcctaccagaaccacagtgacagcaatgcagattcaggaactatgcatgaaatcctctccttccacacatatccatcttttgggggtgggtgggtctttaaaaacaaaatgcgggctataattatttattgaccgtgttataaaacagtcttggatgcttcattcatcaatattgtcccttgaaaataatctccattctcttccaaattaaggtttggtttggttttgttttgttttaatcttctagattgtagaaggcatgaaacaaaaaatgtggagtattgaaaatattgccttcggttctggtggaggtttgctacagaagttgacaagagatctcttgaattgttccttcaagtgtagctatgttgtaactaatggccttgggattaacgtcttcaaggacccagttgctgatcccaacaaaaggtccaaaaagggccgattatctttacataggacgccagcagggaattttgttacactggaggaaggaaaaggagaccttgaggaatatggtcaggatcttctccatactgtcttcaagaatggcaaggtgacaaaaagctattcatttgatgaaataagaaaaaatgcacagctgaatattgaactggaagcagcacatcattaggctttatgactgggtgtgtgtag

SEQ ID NO: 23 - DNA, 1033 bp, Homo sapiens
  misc_feature: Template ID: 401269.5
  unsure 406: a, t, c, g, or other
agaacagctaggcaagtgaacaacaaccccccttgcttctttgtaacgtcttgagagctggagattctatagagcaagggacagaggcaggaggatgctaagaattaagaacacctgagttgattccctgcttcactctttgatctttctttggaaagttctgggattgactcatttgttgctgcttgttccactgccacttgtttctgtttctttgctgcctacctttctgatgtagaaacactctgctgtcttcaggttctctaagacttttgcttctgacaataacaaggcaaaagtaaaaagtaccaaaagagggatacgttatgaaataggaaagcctttaccttagtaatactcttgttccctctccaaagattgtgtgtgtggtttggcgtattggtanagttgggcttttcttcaacagcatgtacatgctgtgctttactgtcagtttaaaggcagtttgtaatataaagagataccttaagggtcacatgttagaatgctcacagacttcctacaaatggagtattaggtgttcttcagtggcaaaaaggatatccaagatgtcatactttttctttattacaaacgactatccttcaaaacaggctaaagtgttatgtttctgaaagccagatgtggattggttcagttatacctattaagtgcttaaaacttaaatgtaaattatgtatgtgcttttttgtaagggagtgtttagacatttctgatgattagtcttctacttgtctaactttcttaatttggatttcagattaacgtcttcaaggacccagttgctgatcccaacaaaaggtccaaaaagggccgattatctttacataggacgccagcagggaattttgttacactggaggaaggaaaaggagaccttgaggaatatggtcaggtatgtatctatgctgattggtttttttaagcaatagtaggttggctcaccaaattaataagaaaggaggtttttatgttatgtttttgtggaagacaaagtattatatttattata

SEQ ID NO: 24 - DNA, 1024 bp, Homo sapiens
  misc_feature: Template ID: 221172.2
  unsure 84, 923, 930-958: a, t, c, g, or other
ctgggaagctggaggcagcggggcagccccggcgcgtgacctgggcgcttacctaagttcgagttcccggcacgggcgcggganggcggggcctggagggggcgttcccagctttgccagtgccacgaggagccggttcgcccgccccgcctgggaccttccgtcctacccagtcctggccggttttctgggtcctcctgaagtcacgccacccggctagggggcgaggagcctcctactgcccatcttcccgtccaccacgcgcagttactcacctttgtctccggcctggattaaggatccagcctttcgcctccatccctcttgtccctcctgatcctcctgaccctgtctttaagatcccaggagctgcggtgaggagtgaggctgaggggcccctttcatctgatgcagcgactccgctttcctccggcggctctgtctatggctgagctctttgatcctttgagagatggtttgacttttcccgagcaaagagcctgcgttgaaaagcgggggtggaattcagtcctcacagataatgaggggacaagacctaattgaaccgagtattgccgggaaggaaaaggcaacgggccaagcctttgacagggtgcgaaactgacttttatcatcgttatagtctttaaatcctgggaaacgagttggcaaccccaaaataaagaagtgtaatgacgtctgatgacttcacccaaatacagaccattccaagaaagacttgcgcagttctcatgcgtggttgcgtttttgcataaaactaagattccctttgtccgcatgtttaatagcttaaaaataaattgaggtttttatcggataaaagtagccaggaaaaagtgatacagtgaaaacgattacaggatatttatagacttgtctttcaagttattagaagtctcatnctatctnnnnnnnnnnnnnnnnnnnnnnnnnnnnnaacttgtgaattgagattcatagtggaacttgtgaattgagattcatctcgaaactggaggcatgg

SEQ ID NO: 25 - DNA, 1328 bp, Homo sapiens
  misc_feature: Template ID: 055554.1
  unsure 1306: a, t, c, g, or other
aaaacagtatgctgtaatgatctcacaagatgtttttgcttttaaaaatgtgtgctgttttaaaaacaaatctttgtccatcagtgtgcctttaaaaaaatctattacagtgagcagggtttgttgaagacattgacacttaaagcaccgcgcccggcgtaaatcaggttttttaaatgtttgccaaaccttatcactgacttttataacaaaattatttactataatcattagggaatatttaagttctgctaatacttaaaattgcagagtgctaaaaccagcagtgagtttagaatcaagctaagctttattgttgctactatttgaggcatattagttgactggtgttcatatgcaaggcagtctactgggtgcaacaagggttagaaggatatttttaaaaaactgaccctattctcaggatgaaaataatacactagtaatagtctgctctgttggttaactcctcgtaaggaggtacaattaaaatgctgtagtgttgcaagggaaggagaggaagaatcatattccttcactagcaggatcaagaaagcttttatagaaatatacaaaatcttcacttcttgaaggattggtaaaatttaatagccaacattgggcacttattcattctctgagtaaatatttattgcatgcgtatcatgtatcaagcattgtgatgaaagcacaagaatgaaagaggagggagaatgtttagagaataagggctgaaacacagattttgtagggagcgtaggggagactgagaagacaggttcaggttagtaagggcgctcatattttgacactgaatgttaactatgtgcacatcatgctagctattctaaatcaggcattttcaaatggaagcaggcactgacatttttgagcaaagacgtgatgttatgagataaatatcttaggggacttttttatatttttatagcaggatatctatcctatggattgaaaaaaaggaaaaatcagaaggtagtctttataggaagctattccagcagtcttaaggtaatgaagtccagaccaaggtgctaaataaatggaaagaaataggtaaacatgagcaatggcttgggagataaaattgctcaaagttggtaatttgagttgggactcagtagaaaatagattcagctgacgtttatgagcattgtattagtaaggccttgttgaacacttttacatacaactttcaagactaggaaactgggaaaataagagtgtctttaacaaagttttaagagttatttttagtttggccttagatgtacatacatcttttaancctctaacatagtatgcacata

SEQ ID NO: 26 - DNA, 3273 bp, Homo sapiens
  misc_feature: Template ID: 331567.1
  unsure 30, 34, 42, 1353-1381: a, t, c, g, or other
gcgctccgccgctcgcgcctcgggctcggntcgngctccggnatgtccgcgctgtgcgaccctcccggggccccaggaccacctgggcctgccccggccacccacggtcccgcgcctctcagtgctcaggagctgtcccaggaaatcaaggcttttctgactggcgtagaccccattctgggccaccaactctcagcccgggaacatgctcgctgtggtcttctcctgctccgttctttgccacctgctcgggctgctgtgcttgaccacttgagaggtgtctttgatgagagtgtccgggcccacctggctgccctggatgaaacccctgtggctggtccacctcacctccgtccacctccaccctctcatgtccctgctggtggacctggtctagaggatgtggttcaggaagtgcagcaggtgctgtctgagtttatccgggccaacccaaaggcctgggcacctgtgattagtgcatggtccattgacctcatggggcaactgagcagcacgtactcaggccagcaccagcgtgttccccacgctactggcgctcttaatgaactgctacagctgtggatgggttgtagggccacgcgtacattaatggacatctatgtgcagtgcctctcggctctcattggtagctgcccagatgcgtgtgtggatgccttgctggatacctctgttcagcattctccacactttgactgggttgtggcacatattggctcctcttttcctggcaccatcatttcccgggttctctcctgtggccttaaggacttttgtgtccatggtggggctggaggtggagctggcagtagtggtggaagctcttctcagaccccctctacagaccccttccctggatctcctgccattcctgcggagaaacgggtgcccaagattgcctcagttgtaggcatcctaggtcacctggcctcccgccacggagatagcatccgacgggagctcctgcgaatgttccatgatagcctggcagggggatctggaggccgcagtggggacccctcccttcaggccacggttccgttcctactgcagctggcagtcatgtcaccagctttgctgggcactgtctctggagagcttgtggattgcctcaagcccccagctgtgctgagccagctgcagcaacaccttcaaggattcccccgagaggagctggacaacatgttgaacctggctgtgcacctggtgagccaggcctctggggcaggtgcctaccgcttgctgcagttcctggtggacacagctatgcctgcttcggtcattaccacccagggcctggctgtgccagacaccgtgcgtgaggcttgtgaccgnnnnnnnnnnnnnnnnnnnnnnnnnnnnnaaaaactggttcatcaccggggagggtctcctggggaaggggtgctaggcccgcccccacctccccgcttggtgccctttttagatgcgctcaaaaaccatgttggagagctgtgtggagagacgttacgattggaacggaagcgcttcctctggcagcaccagctcttgggcctgctgtctgtctatacccggcctagctgtggacctgaggccttgggccatctgctgagccgagcccgaagccctgaagagttgagtttggccacccagttatatgcagggctagtggtcagcctctctggcctcctgcccctggctttccgaagctgtctggctcgggtgcatgcagggacattacagcctcccttcacggcccggttcctgcgcaacttggcactgctagtagggtgggaacagcagggtggcgagggccctgcagccctaggggcgcactttggggaatctgcctcagcccatctgtctgacctggctcctctcctgctacatcctgaggaggaagtagctgaagctgctgcctctctcctggccatttgtccctttccttctgaagccttatccccctcccagctcctgggactggtaagggctggggtgcaccgcttctttgcctctctgaggctgcatggacccccaggtgtggcctcagcctgtcagcttctcacccgcctgtctcagacatccccagctgggctcaaggctgtcctgcagctgctggttgaaggagccttacatcgaggcaacacagaactgtttggtgggcaagtagatggggacaatgagactctctcagttgtttcagcttctttggcttctgcctccctgttggacactaaccggaggcacactgcagctgtgccaggtcctggagggatttggtcagttttccatgctggagtcatcggccgtggcttaaagccacccaagtttgtccagtcacgaaatcagcaggaagtgatctataacacccagagcctcctcagcctcctggttcactgctgcagtgccccagggggcactgaatgtggggaatgctggggggcacccatcttgagtccagaggcagccaaagcagtggcagtgaccttggtggagagtgtgtgtcccgatgcagctggtgcagagctggcctggccccccgaggaacacgcccgggccaccgtggagcgggatctccgcattggccggcgcttccgcgaacagcccctgctctttgagctgttaaagctggtagcagctgcacccccagccctgtgctactgttccgtgctgcttcgggggctgctggccgccctcttgggccattgggaagcctctcgccaccctgacacgacccactccccctggcacctggaggcatcctgcaccttagtggctgtcatggctgagggaagcctcctgcctccggccctgggtaatatgcatgaagtatttagccaactggcacctttcgaggtgcgtctgctgctgctcagtgtctggggttttctccgggagcatgggcccttgcctcagaagttcatcttccaatcagagcggggtcgcttcattcgggacttctccagggagggtggaggtgagggtggaccccatctggctgtgctgcacagtgtcctccaccgcaacatcgaccgcctaggtcttttctctggccgtttccaggcaccttcaccgtccactctccttcgacaggggacgtagccttttcttgctctggaagcccagggaggttgagcagtgagagagggaagggactaacgtgctccggaagggtggaggtttctcttctaagtccttggtctaaagagcgctgtcacttttttctctcccacttttttttttctaaataaaatttgccaacttgagaaaacc

SEQ ID NO: 27 - DNA, 450 bp, Homo sapiens
  misc_feature: Template ID: 010742.1
gtacaaatagcctttttgactgagaaggaaaagagaaattcaacaacatcaaagaatgggagtgactaaagtgtgtttttcagctggtacataggagccagtagagagaaaaggttgaagatggagggaagagaagaaccagttgttaggacaaggtgccagggatgttgggaagaaaacagatccagggacatatgatggagggtggacttaactaccctaagatttgagggcaacaaatatttgcttggggcatgggagtgattaggatggtggcttaaggagagtgacaaaaattttagaatagctgctaaagggagaatgaaagcaaatgaaagagttgtctgccagatggtgttaagagcccatctgaaagtgaaaaccatgaattgttcatcacatcattcaatctgcatgggtagatgctgcctttcatttgaaagcagcata

SEQ ID NO: 28 - DNA, 1744 bp, Homo sapiens
  misc_feature: Template ID: 202426.1
agcagatatcgtttttcaaagacaggatggagggcacagaggtgaaggatacttgtccacacttgaagtgcacagtgctatcaccactactggtgacccctggctcgggaatgagctcagttggttttctgaatgtttgtcaattactctgtttccctaaagtttgtggggaggactcccacagtctgccacaagcaagcatcaccatctccacttgctacctacatctggaccagtgctccccctctgcccccaggcctgagctcatcctgagctagtgatgccagtgtccagagcacatggagtgaccctctgagtgccgagtgcttaggcagagctgccgtgctctgaacttgagctctggtggggctcccagctccatcatgcatggtgactaggggaaagatggggctggcccaggactcatgctgaaagagaaattcaatctaacaaggcccatattaattatattaacccgggaaatatgatgatgagcaagaaaggagcttatgattcattttatgagaaggataagctcccaagtcattacagcataggaagaactctagagccacaagagatgcttcctgatgtcagggggttggtgaggagaatatcatgccaagctggccaggtcagggaaagaaggtgacattcatgttgatgttgaaggaggtataggatttcagcggacagggatggagcaacagggagagagagaggacagagaaacagcataagtgaaagcagagaggcgggaaataatcttcataacaatagtcacttatagaagacctatcagcaaatggactgtactgttcacatacagatgctcatggtaggatgtgtctaagattccaatggagtgaaattttcctgtggcaggccagatggaactaatctagaagaactcaggtggtggcaggttcaggaggcttaggactcaactcttacttaaactttgattagctatggtgggatggatttgagcagaacaagatgggattgcagatgtgctttaggaggacttgcctagcagatgtagcaaagtctgaaaggaagaatctgggagtccggagtcttaagcctggaaaaccagaggaatcgggcatcattgacagaagtaggaaagtcaagagcaggcttggatgatgcagagcttagttttctgtgtgtttggaatcatcaggcagagaggtctagcagatagctagagatgtgggttagcagagtgttgagggctggagaggaatgtgtgtagagagattaactggaacccagcaagaagtgaaaacatggagggaagagttcagaaccaaggacagagccctcggggcacctgcatttaaagacaaagggtaggaggaagacattgatcaaggtgctggagcagaatcaaacaggtggaagatgagaagtcaagagccatgaatgtttcaaggaggagagcagagctagagaggtggaggaggaccgggattgagaggaggctattgaacttatcattcacaaggtcactaatgaagttcagaagagcagatcaacagagcaatgacagcagaagccagaagagaagagttaagaaagagtagacagatggcagacagcaggtgcaggagaaacaaacagtggcttctccatgctttgaattttcccttctcccttactccctttttttcccctattcttcctttcttttttccctttatttactcattcattcaataaacttttattgtgtgtc

SEQ ID NO: 29 - DNA, 545 bp, Homo sapiens
  misc_feature: Template ID: 132211.1
  unsure 74, 314-316: a, t, c, g, or other
ggcagcttgtgcctgttccactgaatgcgagagcctgttggctccactttacagatgaggaagctgaggttcangggaggtaaggtcaagatcactcagcagggatttaaagagctgtctcctgactccaggtctgcatgtctcccagaaactgccttggggtcccagcctccaagggggcaggtgccacatcagtgggacaaaagaaaagtgtccctttttctggctgaggagaggctaatcctggctttgtccaggcagggttggtgcctggaggatcctgtgctgaaaccggctcccttccatccccccannncccccaccccttgtcccttgccctatgggggccttttcttgagagggctgagatctctcctggaagatgactagccgtttccagactaaccttgggaattgacctcactggtttacatagcagcacgaagagggcaggtggggcctgattcactggccctgagtgggtcaggggtcatggaatcacagaactgggggcatccctgatgattcacagggcctggcacaag

SEQ ID NO: 30 - DNA, 2004 bp, Homo sapiens
  misc_feature: Template ID: 018414.15
tctcgataaagttgttgtcgcggcttccgccgcgggtggaagaagatggcgtcgggtggtggtggctgtagcgcttcggagagactgcctccgcccttccccggcctggagccggagtccgagggggcggccgggggatcagaacccgaggctggggacagcgacaccgagggggaggacattttcaccggcgccgcggtggtcagtaaacatcagtctccaaagataactacatcccttcttcccatcaacaatggctccaaagaaaatgggatccatgaagaacaagaccaagagccacaggatctctttgcagatgccacagtggagctatccttggacagcacacaaaataatcagaagaaggtgctagccaaaacactcatttctcttcctcctcaggaagccacaaattcttcgaagccccagccaacctatgaggagctagaggaagaagaacaggaggatcaatttgatttgacagtcggtataactgatcctgagaagataggggatggtatgaatgcatatgtagcctacaaagttacaacacagacaagcttaccattgttcagaagcaaacagtttgcagtaaaaagaagatttagtgactttctgggtctttatgagaagctttccgagaagcactctcagaatggcttcattgtccctccgcccccggagaagagcctcatagggatgacaaaagtgaaagttgggaaggaagattcttcttctgcagaatttcttgaaaaacggagggccgctttagaaaggtaccttcagaggattgtaaatcatcctaccatgttacaggaccctgacgtcagagagttcttggaaaaagaagagctgccacgtgccgtgggtacccagacattgagtggtgctggtctcctcaagatgttcaacaaagccacagatgccgtcagcaaaatgaccatcaagatgaatgaatcagacatttggtttgaggagaagctccaggaggtagagtgtgaggagcagcgcttacggaaactgcatgctgttgtagaaactctagtcaaccataggaaagagctagcgctgaacacagcccagtttgcaaagagtctagccatgcttgggagctctgaggacaacacggcattgtcacgggcactctcccagctggctgaggtggaagaaaaaattgagcagctccaccaggaacaggccaacaatgacttcttcctccttgctgagctcctgagtgactacattcgcctcctggccatagtccgcgctgccttcgaccagcgcatgaagacatggcagcgctggcaggatgcccaagccacactgcagaagaagcgggaggccgaggctcggctgctgtgggccaacaagcctgataagctgcagcaggccaaggacgagatcctcgagtgggagtctcgggtgactcaatatgaaagggacttcgagaggatttcaacagtggtccgaaaagaagtgatacggtttgagaaagagaaatccaaggacttcaagaaccacgtgatcaagtaccttgagacactcctttactcacagcagcagctggcaaagtactgggaagccttccttcctgaggcaaaggccatctcctaatggaccaaggaccccagagcccacctgtgtgacgctgcctttttatacactgtcctcctccaccttgatggacccctagtgatgcatcctgcctaggctggacttaaccccttcctccctgtccccacgaccaactgtccccagttactctaaccgttatttcatttagcttccatatatattttcttacctaagagaatagtttcctgctttaagcaaaagacctacaataggtggtggaattatgggatggggtggagtattgatataaatatataaatacaaatgtatatttttcaggatgtggtttaggaactgggaataacgttttctgttactcctgatggtgccatgaaaaggttatgtaataaaatattttaaaatcaggtc

SEQ ID NO: 31 - DNA, 2058 bp, Homo sapiens
  misc_feature: Template ID: 480348.17
acgggtccgcgaggcccagctcgcgcagtcgttcgggtgagcgaagatggcggccgagagggaacctcctccgctgggggacgggaagcccaccgactttgaggatctggaggacggagaggacctgttcaccagcactgtctccaccctagagtcaagtccatcatctccagaaccagctagtcttcctgcagaagatattagtgcaaactccaatggcccaaaacccacagaagttgtattagatgatgacagagaagatctttttgcagaagccacagaagaagtttctttggacagccctgaaagggaacctatcctatcctcggaaccttctcctgcagtcacacctgtcactcctactacactcattgctcctagaattgaatcaaagagtatgtctgctcccgtgatctttgatagatccagggaagagattgaagaagaagcaaatggagacatttttgacatagaaattggtgtatcagatccagaaaaagttggtgatggcatgaatgcctatatggcatatagagtaacaacaaagacatctctttccatgttcagtaagagtgaattttcagtgaaaagaagattcagcgactttcttggtttgcacagcaaattagcaagcaaatatttacatgttggttatattgtgccaccagctccagaaaagagtatagtagggatgaccaaggtcaaagtgggtaaagaagactcatcatccactgagtttgtagaaaaacggagagcagctcttgaaaggtatcttcaaagaacagtaaaacatccaactttactacaggatcctgatttaaggcagttcttggaaagttcagagctgcctagagcagttaatacacaggctctgagtggagcaggaatattgaggatggtgaacaaggctgccgacgctgtcaacaaaatgacaatcaagatgaatgaatcggatgcatggtttgaagaaaagcagcagcaatttgagaatctggatcagcaacttaggaaacttcatgtcagtgttgaagccttggtctgtcatagaaaagaactttcagccaacacagctgcctttgctaaaagtgctgccatgttaggtaattctgaggatcatactgctttatctagagctttgtctcagcttgcagaggttgaggagaagatagaccagttacatcaagaacaagcttttgctgacttttatatgttttcagaactacttagtgactacattcgtcttattgctgcagtgaaaggtgtgtttgaccatcgaatgaagtgctggcagaaatgggaagatgctcaaattactttgctcaaaaaacgtgaagctgaagcaaaaatgatggttgctaacaaaccagataaaatacagcaagctaaaaatgaaataagagagtgggaggcgaaagtgcaacaaggggaaagagattttgaacagatatctaaaacgattcgaaaagaagtgggaagatttgagaaagaacgagtgaaggattttaaaaccgttatcatcaagtacttagaatcactagttcaaacacaacaacagctgataaaatactgggaagcattcctacctgaagccaaagccattgcctagcaataagattgttgccgttaagaagaccttggatgttgttccagttatgctggattccacagtgaaatcatttaaaaccatctaaataaaccactatatattttatgaattacatgtggttttatatacacacacacacacacacacacactctgacattttattacaagctgcatgtcctgaccctctttgaattaagtggactgtggcatgacattctgcaatactttgctgaattgaacactattgtgtcttaaatacttgcactaaatagtgcactgcaagaccagaaaattttacaatattttttctttacaatatgttctgtagtatgtttaccctctttatgaagtgaattaccaatgctttgaataatgttcacttatacattcctgtacagaaattacgattttgtgattacagtaataaaatgatattccttgtgaaaaaaa

SEQ ID NO: 32 - DNA, 1762 bp, Homo sapiens
  misc_feature: Template ID: 1135462.6
  unsure 33: a, t, c, g, or other
tgggcgctgtagtccggccggaacctgtttgcnaccccgagtcccatgacaccgcttctcctcacaccccagtccgcagtgcccctccccagcctcggccgggcctcccgggagccgggcgtggcgttccagctagtgagccgtttctcccctgggctcggaggcggaagcttgaggggcgcggggaggagcttcgcgtgcggggtgaacgcccgctctacgtgctcgttctcttcgcgaccgctgcgcgcgagccccgtgtccccacggcgggcagcagcgtcggcggcggcggctgaacgcggagggggcggagggagcccgcggcggcgggcagcagctacagcgaaatggcggagaccgtggctgacacccggcggctgatcaccaagccgcagaacctgaatgacgcctacggaccccccagcaacttcctcgagatcgatgtgagcaacccgcaaacggtgggggtcggccggggccgcttcaccacttacgaaatcagggtcaagacaaatcttcctattttcaagctgaaagaatctactgttagaagaagatacagtgactttgaatggctgcgaagtgaattagaaagagagagcaaggtcgtagttcccccgctccctgggaaagcgtttttgcgtcagcttccttttagaggagatgatggaatatttgatgacaattttattgaggaaagaaaacaagggctggagcagtttataaacaaggtcgctggtcatcctctggcacagaacgaacgttgtcttcacatgtttttacaagatgaaataatagataaaagctatactccatctaaaataagacatgcctgaaatttggcaagaaggggcaaaaacgtgactattaatgattgataagcaccagtgaagaagttctaacttttagcatgctgcacagaaactggtataacatgccttcagtatactaacactcatatgctcagttttgttttgttttggcagttgacaagaagttaatttgctttagtaaaaatccctcattccagcctttctatataaatagctctttcttgctgttttaatgtggtgcacactatagcctcacaaacctgttattccagtgtaatctgcagtgtcgtaactaaagttactggcttggtcttatttgcacagtttttgcgtcttgtttgcttcttgcatctgattaactagaatatttctctttcccccttttaatttgtgatgtcacttgaccccatttatgtgtaggagcactacaccattggtttccaatactgcacacataagatacatacttgtgtgcagaaagtatcttcctccaggcttgtaatacccttcacatggaagattaatgagggaaatctttatattctgtataaaaacaaaagcaaatttatatactaaaatcatttgtctaaaaatttaagttgttttcaaataaaaattaaaatgcatttctgatatgcactgattgtgttgcctccagctttttttgctctctatgagtgactacttaagtcacttgttgagagggattatttactaattatatacttctcattcctgtaactccattccctttaaacagtggtgatatcaaatatacttccatccattgaatggggtatttttaacaacaacaaaagtgatatactaaaaaatgtattgcttaaggcttattgaatcattttgaagcactttgtgtatttgaaaactgctttataatctcatttattaaaaggactttcaaagat

SEQ ID NO: 33 - DNA, 3718 bp, Homo sapiens
  misc_feature: Template ID: 1094479.5
  unsure 3139, 3417, 3435: a, t, c, g, or other
ggcggaaccccgtcaggaaaagcgcacaaaactgctcttaagtcattgcagagctaccgcttcggttagccagccacgaagttctcgcgagagtcgtctcctcgataccaagcgcctgtgtctggcagagctggtgtgagacgagacaatcctgccccgccgccgggataatcaagagttttggccggacctttgagcatacaccgagagagtgaggagccagacgacaagcacacactatggcgctgaaacggattaataaggaacttagtgatttggcccgtgaccctccagcacaatgttctgcaggtccagttggggatgatatgtttcattggcaagccacaattatgggacctaatgacagcccatatcaaggcggtgtattctttttgacaattcattttcctacagactaccccttcaaaccacctaaggttgcatttacaacaagaatttatcatccaaatattaacagtaatggcagcatttgtctcgatattctaagatcacagtggtcgcctgctttaacaatttctaaagttcttttatccatttgttcactgctatgtgatccaaacccagatgaccccctagtgccagagattgcacggatctataaaacagacagagataagtacaacagaatatctcgggaatggactcagaagtatgccatgtgatgctaccttaaagtcagaataacctgcattatagctggaataaactttaaattactgttccttttttgattttcttatccggctgctcccctatcagacctcatcttttttaattttattttttgtttacctccctccattcattcacatgctcatctgagaagacttaagttcttccagctttggacaataactgcttttagaaactgtaaagtagttacaagagaacagttgcccaagactcagaatttttaaaaaaaaaaatggagcatgtgtattatgtggccaatgtcttcactctaacttggttatgagactaaaaccattcctcactgctctaacatgctgaagaaatcatctgagggggagggagatggatgctcagttgtcacatcaaaggatacagcattattctagcagcatccattcttgtttaagccttccactgttagagatttgaggttacatgatatgctttatgctcataactgatgtggctggagaattggtattgaatttatagcatcagcagaacagaaaatgtgatgtattttatgcatgtcaataaaggaatgacctgttcttgttctacagagaatggaaattggaagtcaaacaccctttgtattccaaaatagggtctcaaacattttgtaattttcatttaaattgttaggaggcttggagctattagttaatctatcttccaatacactgtttaatatagcactgaataaatgatgcaagttgtcaatggatgagtgatcaactaatagctctgctagtaattgatttatttttcttcaataaagttgcataaaccaatgagttagctgcctggattaatcagtatgggaaacaatcttttgtaaatgcaaagctgttttttgtatatactgttgggatttgcttcattgtttgacatcaaatgatgatgtaaagttcgaaagagtgaatattttgccatgttcagttaaagtgcacagtctgttacaggttgacacattgcttgacctgatttatgcagaattaataagctatttggatagtgtagctttaatgtgctgcacatgatactggcagccctagagttcatagatggacttttgggacccagcagttttgaaatgtgtttatggagtttaagaaatttattttccaggtgcagcccctgtctaactgaaatttctcttcaccttgtacacttgacagctgaaaaaaaacaacatgggagtaataatgggtcaaaatttgcaaaataaagtactgttttggtgtgggagttgtcatgaggctgtgttgaagtgacttatctatgtgggatattgagtatccattgaaatggatttgttcagccatttacattaatgagcatttaaatgcaacagatatcatttcaggtgacttaacatgaatgaataaaagtcaatgctattggattgttttttgtttgacaagtgctatctgtgccactgatttaacttctgtagtaacaagggcattaccattcttcacctttcctaattctgatcccatagttttacatttttcctgtttattttgattttgttcactgctttatttcttaaagttctagcacatctgtgactcctccacttccacatttttgcactgcttacacttacgtgcaatcttattccttgtctgcacacacatgtggaaagctagaaataaatgttaaaacttactttttataaacattttaatatgtagtttggacatgatttattgacttaaggttcttctctaaactggaagtgaaatgcatgccttctgaagatgttctggctttgttaattctgtaatcatttcattggggaaaaaaccagctacgcagtttttccaatgagtgaattttttcattttgtgttttgcttaaaacggctccttcagggtagatgtcatactgcataacttttttggattcaaattatgaatgagaaattagttaacattctgctccacaaggtaagaaaaactgctctttggctctattttcaaaattacttctgagatgcatatagtctcaaaataacagctttagtaggcatatcacttcttgaaagccaaacatgagtgtaagacacttttatgaaacacggtggatccctaactggctttcaaattgacctttatagccttagacaacccttaggtatttacggagatgacttctttgattgtcataacaattagtggatgtgtccagttctctgtatctttgacttgatgctttatacatcatttcatttgttgcttctaagggaataagccatagaggcttctccaggtttaaaagaacagtaaagtacctggaaaaccaacatttttgaatgtatggacactggacatgagatatgtacaatgaaatcttaaaagaatctaagaatttgccctctttgccccactccacccagtaatttgacattactagngccatgtataggacccaactgagtattagaatcagttttgactatgtctttgtatttcctaaatcttttaatgcataaaccgaattagggtccagttggcctgttaatggtaaatttacattttaaatgactcagtttgtttttcctgggcgagtttgcaatgtgataatcagattttttaaaactgattaatttgctttcttgtgtgggtgtactcacattttaaagtatgaaccacagttaactagtggtctcaggggtagtgaaacactcacggnctttttgtttgtttgttntttttgtgtttgttgaaatggcttagttgaagtatacttaaggtactgatcatgctgtgttagtaatttgggcggggaggggggtaactcagccatgttttgtgttggcataacaaaactgttaatgattgttgattacacttttaagtgaatttgtcttttatgaggaacccagtgcaagtcactaaatattgtctaatagtgacatctgcataagacttgtaatagctgaagttaattgagcttaaaggaattgttaccattaaagtctgtgtttaaagac

SEQ ID NO: 34 - DNA, 2165 bp, Homo sapiens
  misc_feature: Template ID: 155345.4
ggctcttttaaatgaccccaggcgtcgtgtattgaatcctagactcacgtccgtctcgccggcgcccgagccagtccgcgcgcaccgcgtctgcgtccccgaaagccccgcccgcaagggctgccctgcctacctggtctccgacgtgctcgtctggagggcggtgcgaggggccgagccgacaagatgttcttgctgcctcttccggctgcggggcgagtagtcgtccgacgtctggccgtgagacgtttcgggagccggagtctctccaccgcagacatgacgaagggccttgttttaggaatctattccaaagaaaaagaagatgatgtgccacagttcacaagtgcaggagagaattttgataaattgttagctggaaagctgagagagactttgaacatatctggaccacctctgaaggcagggaagactcgaaccttttatggtctgcatcaggacttccccagcgtggtgctagttggcctcggcaaaaaggcagctggaatcgacgaacaggaaaactggcatgaaggcaaagaaaacatcagagctgctgttgcagcggggtgcaggcagattcaagacctggagctctcgtctgtggaggtggatccctgtggagacgctcaggctgctgcggagggagcggtgcttggtctctatgaatacgatgacctaaagcaaaaaaagaagatggctgtgtcggcaaagctctatggaagtggggatcaggaggcctggcagaaaggagtcctgtttgcttctgggcagaacttggcacgccaattgatggagacgccagccaatgagatgacgccaaccagatttgccgaaattattgagaagaatctcaaaagtgctagtagtaaaaccgaggtccatatcagacccaagtcttggattgaggaacaggcaatgggatcattcctcagtgtggccaaaggatctgacgagcccccagtcttcttggaaattcactacaaaggcagccccaatgcaaacgaaccacccctggtgtttgttgggaaaggaattacctttgacagtggtggtatctccatcaaggcttctgcaaatatggacctcatgagggctgacatgggaggagctgcaactatatgctcagccatcgtgtctgctgcaaagcttaatttgcccattaatattataggtctggcccctctttgtgaaaatatgcccagcggcaaggccaacaagccgggggatgttgttagagccaaaaacgggaagaccatccaggttgataacactgatgctgaggggaggctcatactggctgatgcgctctgttacgcacacacgtttaacccgaaggtcatcctgcaatgccgccaccttaacaggtgccatggatgtagctttgggatcaggtgccactggggtctttaccaattcatcctggctctggaacaaactcttcgaggccagcattgaaacaggggaccgtgtctggaggatgcctctcttcgaacattatacaagacaggttgtagattgccagcttgctgatgttaacaacattggaaaatacagatctgcaggagcatgtacagctgcagcattcctgaaagaattcgtaactcatcctaagtgggcacatttagacatagcaggcgtgatgaccaacaaagatgaagttccctatctacggaaaggcatgactgggaggcccacaaggactctcattgagttcttacttcgtttcagtcaagacaatgcttagttcagatactcaaaaatgtcttcactctgtcttaaattggacagttgaacttaaaaggtttttgaataaatggatgaaaatcttttaacggagacaaaggatggtatttaaaaatgtagaacacaatgaaatttgtatgccttgatttttttttcatttcacacaaagatttataaaggtaaagttaatatcttacttgataaggatttttaagatactctataaatgattaaaatttttagaacttcctaatcacttttcagagtatatgtttttcattgagaagcaaaattgtaactcagatttgtgatgctaggaacatgagcaaactgaaaattactatgcacttgtcagaaacaataaatgcaacttgttgtgcaaaagaaaaaagataaataaaaaaaaagggcggcccccg

SEQ ID NO: 35 - DNA, 1054 bp, Homo sapiens
  misc_feature: Template ID: 198893.4
cacgagagcgcctgacatgcctgatcctctcttttctgcagttcaagggaaagacgagatcttgcacaaggcactctgcttctgcccttggctggggaagggtggcatggagcctctccggctgctcatcttactctttgtcacagagctgtccggagcccacaacaccacagtgttccagggcgtggcgggccagtccctgcaggtgtcttgcccctatgactccatgaagcactgggggaggcgcaaggcctggtgccgccagctgggagagaagggcccatgccagcgtgtggtcagcacgcacaacttgtggctgctgtccttcctgaggaggtggaatgggagcacagccatcacagacgataccctgggtggcactctcaccattacgctgcggaatctacaaccccatgatgcgggtctctaccagtgccagagcctccatggcagtgaggctgacaccctcaggaaggtcctggtggaggtgctggcagaccccctggatcaccgggatgctggagatctctggttccccggggagtctgagagcttcgaggatgcccatgtggagcacagcatctccaggagcctcttggaaggagaaatccccttcccacccacttccatccttctcctcctggcctgcatctttctcatcaagattctagcagccagcgccctctgggctgcagcctggcatggacagaagccagggacacatccacccagtgaactggactgtggccatgacccagggtatcagctccaaactctgccagggctgagagacacgtgaaggaagatgatgggaggaaaagcccaggagaagtcccaccagggaccagcccagcctgcatacttgccacttggccaccaggactccttgttctgctctggcaagagactactctgcctgaacactgcttctcctggaccctggaagcagggactggttgagggagtggggaggtggtaagaacacctgacaacttctgaatattggacattttaaacacttacaaataaatccaagactgtcatatttagctgg

SEQ ID NO: 36 - DNA, 1988 bp, Homo sapiens
  misc_feature: Template ID: 200569.1
  unsure 1886: a, t, c, g, or other
acggtaaactgaattgatccgtttagaagtttacaatgaagtttcttctaatactgctcctgcaggccactgcttctggagctcttcccctgaacagctctacaagcctggaaaaaaataatgtgctatttggtgaaagatacttagaaaaattttatggccttgagataaacaaacttccagtgacaaaaatgaaatatagtggaaacttaatgaaggaaaaaatccaagaaatgcagcacttcttgggtctgaaagtgaccgggcaactggacacatctaccctggagatgatgcacgcacctcgatgtggagtccccgatgtccatcatttcagggaaatgccaggggggcccgtatggaggaaacattatatcacctacagaatcaataattacacacctgacatgaaccgtgaggatgttgactacgcaatccggaaagctttccaagtatggagtaatgttacccccttgaaattcagcaagattaacacaggcatggctgacattttggtggtttttgcccgtggagctcatggagacttccatgcttttgatggcaaaggtggaatcctagcccatgcttttggacctggatctggcattggaggggatgcacatttcgatgaggacgaattctggactacacattcaggaggcacaaacttgttcctcactgctgttcacgagattggccattccttaggtcttggccattctagtgatccaaaggccgtaatgttccccacctacaaatatgttgacatcaacacatttcgcctctctgctgatgacatacgtggcattcagtccctgtatggagacccaaaagagaaccaacgcttgccaaatcctgacaattcagaaccagctctctgtgaccccaatttgagttttgatgctgtcactaccgtgggaaataagatctttttcttcaaagacaggttcttctggctgaaggtttctgagagaccaaagaccagtgttaatttaatttcttccttatggccaaccttgccatctggcattgaagctgcttatgaaattgaagccagaaatcaagtttttctttttaaagatgacaaatactggttaattagcaatttaagaccagagccaaattatcccaagagcatacattcttttggttttcctaactttgtgaaaaaaattgatgcagctgtttttaacccacgtttttataggacctacttctttgtagataaccagtattggaggtatgatgaaaggagacagatgatggaccctggttatcccaaactgattaccaagaacttccaaggaatcgggcctaaaattgatgcagtcttctactctaaaaacaaatactactatttcttccaaggatctaaccaatttgaatatgacttcctactccaacgtatcaccaaaacactgaaaagcaatagctggtttggttgttagaaatggtgtaattaatggtttttgttagttcacttcagcttaataagtatttattgcatatttgctatgtcctcagtgtaccactacttagagatatgtatcataaaaataaaatctgtaaaccataggtaatgattatataaaatacataatatttttcaattttgaaaactctaattgtccattcttgcttgactctactattaagtttgaaaatagttaccttcaaaggccaagagaattctatttgaagcatgctctgtaagttgcttcctaacatccttggactgagaaattatacttacttctggcataactaaaattaagtatatatattttggctcaaataaaattgaaaaaaaaatcatttggtttttaatatatttttcttgagaaacagaatgtgtattttgaaaataactctgaacctactcctanataaaaacaagtctctctgactatatcaagagatgaatagaaatatggcaagtagaaataaaagcttagatttcttttggtcacttgggtaacaccacttgt

SEQ ID NO: 37 - DNA, 4189 bp, Homo sapiens
  misc_feature: Template ID: 233706.3
  unsure 4134, 4171: a, t, c, g, or other
cagggagccgtgacgagtccggaagcgcctgcgcgcgctcctccgtacgagaactagttttgttccgtgccctctggactggaaccttttggagagaacccccggcaggaccaaccccgcacccgccagcaccgcggcaatgtccagcaatagttttccttacaatgagcagtccggaggaggggaggcgacggagctgggtcaggaggcgacctcaaccatttccccctcgggggccttcggcctctttagcagcgatttgaagaagaatgaagatctaaagcaaatgttagagagcaacaaagattctgctaaactggatgctatgaagcggattgttgggatgattgcaaaagggaaaaatgcatctgaactgtttcctgctgttgtgaagaatgtggccagtaaaaatattgagatcaagaagttggtatatgtttacctggttcgatatgctgaagaacagcaggatcttgcactcctgtccataagcacttttcagcgagctctgaaggacccaaaccaactaattcgtgcaagcgctttgagagttctgtcaagtattagagtgccaattattgtacctatcatgatgcttgctattaaggaagcttctgctgacttatcaccatatgttaggaagaatgcagcccatgcaatacaaaaattatacagccttgatccagagcagaaggaaatgttaattgaagtaattgaaaaacttctgaaagataaaagcacattggtagctggcagtgttgtgatggcttttgaagaagtatgcccggacagaatagatctgattcataaaaattaccgcaagctatgtaacttactagtggatgttgaagagtgggggcaggttgtcataatccacatgctaactcgatatgctcggacacagtttgtcagcccttggaaagagggtgatgaattagaagacaatggaaagaatttctacgaatctgatgatgatcagaaggaaaagactgacaaaaagaagaagccgtatactatggatccagatcatagactcttaattagaaatacaaagcctttgcttcagagcaggaatgctgcggtggttatggcagttgctcagctgtattggcacatatcaccaaaatctgaagctggcataatttctaaatcactagtgcgtttacttcgtagcaatagggaggtgcagtatattgtcctacaaaatatagcaactatgtcaattcaaagaaaggggatgtttgaaccttatctgaagagtttctatgttaggtcaactgatccaactatgatcaagacactgaagcttgaaattttgacaaacttggcaaatgaagccaacatatcaactcttcttcgagaatttcagacctatgtgaaaagccaggataaacaatttgcagcagccactattcagactatagggcagatgtgcaaccaacatcttggaagtcactgacacgtgcctcaatggcttggtctgtctgctgtccaacagggatgaaatagttgttgctgaaagtgtggttgttataaagaaattactgcaaatgcaacctgcacaacatggtgaaattattaaacatatggccaaactcctggacagtatcactgttcctgttgctagagcaagtattctttggctaattggagaaaactgtgaacgagttcctaaaattgcccctgatgttttgaggaagatgggctaaaagcttcactagtgaagatgatctggtaaaactgcagatattaaatctgggagcaaaattgtatttaaccaactccaaacagacaaaattgcttacccagtacatattaaatctcggcaagtatgatcaaaactacgacatcagagaccgtacaagatttattaggcagcttattgttccgaatgaaaagagtggagctttaagtaaatatgccaaaaaaatattcctagcacaaaagcctgcaccactgcttgagtctccttttaaagatagagatcatttccagcttggcaccttatctcatactctcaacattaaagctactgggtacctggaattatctaattggccagaggtggcgcccgacccatcagttcgaaatgtagaagtaatagagttggcaaaagaatggaccccagcaggaaaagcaaagcaagagaattctgctaagaagttttattctgaatctgaggaagaggaggactcttctgatagtagcagtgacagtgagagtgaatctggaagtgaaagtggagaacaaggcgaaagtggggaggaaggagacagcaatgaggacagcagtgaggactcctccagtgagcaggacagtgagagtggacgggagtcaggcctagaaaacaaaagaacagccaagaggaactcaaaagccaaaggaaaaagtgattctgaagatggggagaaggaaaatgaaaaatctaaaacttcagattcttcaaatgacgaatctagttcaatagaagacagttcttccgattctgaatcagagtcagaacctgaaagtgaatctgaatccagaagagtcactaaggagaaagaaaagaaaacaaagcaagatagaactcctcttaccaaagatgtttcacttctagatctggatgattttaacccagtatccactccagttgcacttcccacaccagctctttctccaagtttgatggctgatcttgaaggtttacacttgtcaacttcctcttcagtcatcagtgtcagtactcctgcatttgtaccaacgaaaactcacgtgctgcttcatcgaatgagtggaaaaggactagctgcccattatttctttccaagacagccttgcatttttggtgataagatggtctctatacaaataacactgaataacactactgatcgaaagatagaaaatatccacataggggaaaaaaaacttcctataggcatgaaaatgcatgtttttaatccaatagactctcttgagcctgagggatccattacagtttcaatgggtattgacttttgtgattctactcagactgccagtttccagttgtgtaccaaggatgattgcttcaatgttaatattcagccacctgttggagaactgcttttacctgtggccatgtcagagaaagattttaagaaagagcaaggagtgctaacaggaatgaatgaaacttctgctgtaatcattgctgcaccacagaatttcactccctctgtgatctttcagaaggttgtaaatgtagccaatgtaggtgcagtcccttctggccaggataatatacacaggtttgcagctaaaactgtgcacagtgggtcattgatgctagtcacagtggaactgaaggaaggctctacagcccagcttatcataaacactgagaaaactgtgattggctctgttctgctgcgggaactgaagcctgtcctgtctcaggggtaacctgcttacatctggactttagaatctggcacacaacaaaagtgcctggcatccactactgctgcctttcatttataataatagcccttccatctggcagtgggggaagaatacactcttgacattcttgtctcctgctttagaatgctagtgtgtatctatcatgtatgcaatactttccccctttttgctttgctaaccaaagagcatatattttactgtcagttgtctcaactcttgaatccatgtggcgttttctctgtcctgctgcttcttttggcctcctcgttttccttctctttttcgacaatggtagacatgaatgagatatttaaagttcattggaaatcttcttccctacagcagtaagcaaaaattagcaaagagatagtctaaatggcctctcagcttggtatgtgaaaatgagatcacatactttttaaatccaaatacaaaagcatagtctctgcaagattttgttctttgaatttcttgatattgtaattgattattgataactgtcatcatgaaattatctctcaataataagataaataaactagcatatgaatcatatttgtctttgcatttttaatgagaaactattaataatcctgaagttcatatgctaaagttttcttattttaaagcaagtattttgagtgttacattatgcagagaagcaatgtggtttagttagcgaaaganaaaccacttgccaaaccaagtaaattttctacttatngtttactccaaggaaaaa

SEQ ID NO: 38 - DNA, 6249 bp, Homo sapiens
  misc_feature: Template ID: 234729.3
ggtccaggtctctctcccaaatacatgaggcggctgtgaggatgaggtcggaggctcaccaaagtaaagaacagccggcggatgctgtcaaataagccataggacttccagatccgcgtccgagtgattgagggccgacagttaagtgcgtaacaacataaggcctgtggtcaaagttcacgtctgtggccagacacaccgaacaagaatcaagagaggaaacaaccctttttttgatgagttgtttttctacaatgtcaacatgaccccttctgaattgatggatgagatcatcagcatccgggtttataattctcactctctgcgggcagattgtctgatgggggaatttaagattgatgttggatttgtttatgatgaacctggccatgctgtcatgagaaagtggcttcttctcaatgacccggaagataccagttcaggttctaaaggttatatgaaagtcagcatgtttgtcctgggaaccggagatgagcctcctcctgagagacgagatcgtgataatgacagtgatgatgtggagagtaatttgttactccctgctggcattgccctccggtgggtgaccttcttgctgaaaatctaccgagctgaggacatcccccagatggatgatgccttctcacagacagtaaaggaaatatttggaggcaatgcagataagaaaaatctcgtggatccttttgtagaagtttcctttgctggaaaaaaggtttgtacaaacataattgagaaaaatgcaaacccagagtggaatcaggtcgtcaatcttcagatcaagtttccttcagtgtgtgaaaaaataaaactaacaatatatgactgggaccgtcttactaaaaatgatgtagttggaacaacatatctacacctctctaaaattgctgcctctggtggggaagtggaagatttctcatcttcgggaactggggctgcatcatatacagtaaacacaggagaaacagaggtaggctttgttccaacgtttggaccttgttacctgaatctttatggaagccccagagagtacacgggattcccagacccctatgatgagctgaatactggaaagggggaaggagttgcctacagaggcaggatcttggttgaattagccacttttcttgagaagacaccaccagataaaaagcttgagcccatttcaaatgatgacctgctggttgttgagaaataccagcgaaggcggaagtacagcctgtctgccgtgtttcattcagccaccatgttgcaagatgttggtgaggccattcagtttgaagtcagcattgggaactatggcaacaagtttgacaccacctgtaagcctttggcatcaacaactcagtacagccgtgctgtatttgatggcaactactattattacttgccttgggcccacaccaagccagttgttaccctgacttcatactgggaggatattagtcatcgcctggatgcggtgaacactctcctagctatggcagaacggctgcaaacaaatatagaagctctaaaatcagggatacaaggtaaaattcctgcaaaccagctggctgaattgtggctgaagctgatagatgaagttatagaagacacgagatacacgttgcctctcacagaaggaaaagccaacgtcacagttctcgatactcagatccgaaagctgcggtccaggtctctctcccaaatacatgaggcggctgtgaggatgaggtcggaagccacagatgtgaagtccacactggcagaaattgaggctggttgataaattaatgccagctgactgaagagccaccagaaccagcatgcctgacatcatcatctggatgatccgggggagagaagagactggcctatgcacgaattcccgcacatcaggtcttgtattccaccagtggtgagaatgcatctggaaaatactgtgggaaaacccaaaccatctttctgaagtatccacaggagaaaaacaacgggccaaaggtgcctgtggagttgcgagtgaacatctggctaggcttaagtgctgtggagaagaagtttaacagcttcgcagaaggaactttcaccgtctttgctgaaatgtatgaaaatcaagctctcatgtttggaaaatggggtacttctggattagtaggacgtcataagttttctgatgtcacaggaaaaataaaactcaagagggaattttttctgcctccaaaaggctgggaatgggaaggagagtggatagttgatcctgaaagaagcttgctgactgaggcagatgcaggtcacacggagttcactgatgaagtctatcagaacgagagccgctaccccgggggcgactggaagccggccgaggacacctacacggatgcgaacggcgataaagcagcatcacccagcgagttgacttgtcctccaggttgggaatgggaagatgatgcatggtcttatgacataaatcgagcggtggatgagaaaggctgggaatatggaatcaccattcctcctgatcataagcccaaatcctgggttgcagcagagaaaatgtaccacactcatagacggcgaaggctggtccgaaaacgcaagaaagatttaacacagactgcttcaagcaccgcaagggccatggaggaattgcaagaccaagagggctgggaatatgcttctctaattggctggaaatttcactggaaacaacgtagttcagataccttccgccgcagacgctggaggagaaaaatggctccttcagaaacacatggtgcagctgccatctttaaacttgaaggtgcccttggggcagacactaccgaagatggggatgagaagagcctggagaaacagaagcacagtgccaccactgtgttcggagcaaacacccccattgtttcctgcaattttgacagagtctacatctaccatctgcgctgctatgtctatcaagccagaaacctcttggctttagataaggatagcttttcagatccatatgctcatatctgtttcctccatcggagcaaaaccactgagatcatccattcaaccctgaatcccacgtgggaccaaacaattatattcgatgaagttgaaatctatggggaaccccaaacagttctacagaatccacccaaagttatcatggaactttttgacaatgaccaagtgggcaaagatgaatttttaggacgaagcattttctctcctgtggtgaaactgaactcagaaatggacatcacacccaaacttctctggcacccagtaatgaatggagacaaagcctgcggggatgttcttgtaactgcagagctgattctgaggggcaaggatggctccaaccttcccattcttccccctcaaagggcgccaaatctatacatggtcccccaggggatcaggcctgtggtccagctcactgccattgagattctagcttggggcttaagaaatatgaaaaacttccagatggcttctatcacatcccccagtcttgttgtggagtgtggaggagaaagggtggaatcggtggtgatcaaaaaccttaagaagacacccaactttccaagttctgttctcttcatgaaagtgttcttgcccaaggaggaattgtacatgcccccactggtgatcaaggtcatcgaccacaggcagtttgggcggaagcctgtcgtcggccagtgcaccatcgagcgcctggaccgctttcgctgtgacccttatgcagggaaagaggacatcgtcccacagctcaaagcctcccttctgtctgccccaccatgccgggacatcgttatcgaaatggaagacaccaaaccattactggcttctaagctgacagaaaaggaggaagaaatcgtggactggtggagtaaattttatgcttcctcaggggaacatgaaaaatgcggacagtatattcagaaaggctattccaagctcaagatatataattgtgaactagaaaatgtagcagaatttgagggcctgacagacttctcagatacgttcaagttgtaccgaggcaagtcggatgaaaatgaagatccttctgtggttggagagtttaagggctcctttcggatctaccctctgccggatgaccccagcgtgccagcccctcccagacagtttcgggaattacctgacagcgtcccacaggaatgcacggttaggatttacattgttcgaggcttagagctccagccccaggacaacaatggcctgtgtgacccttacataaaaataacactgggcaaaaaagtcattgaagaccgagatcactacattcccaacactctcaacccagtctttggcaggatgtacgaactgagctgctacttacctcaagaaaaagacctgaaaatttctgtctatgattatgacacctttacccgggatgaaaaagtaggagaaacaattattgatctggaaaaccgattcctttcccgctttgggtcccactgcggcataccagaggagtactgtgtttctggagtcaatacctggcgagatcaactgagaccaacacagctgcttcaaaatgtcgccagattcaaaggcttcccacaacccatcctttccgaagatgggagtagaatcagatatggaggacgagactacagcttggatgaatttgaagccaacaaaatcctgcaccagcacctcggggcccctgaagagcggcttgctcttcacatcctcaggactcaggggctggtccctgagcacgtggaaacaaggactttgcacagcaccttccagcccaacatttcccagggaaaacttcagatgtgggtggatgttttccccaagagtttggggccaccaggccctcctttcaacatcacaccccggaaagccaagaaatactacctgcgtgtgatcatctggaacaccaaggacgttatcttggacgagaaaagcatcacaggagaggaaatgagtgacatctacgtcaaaggctggattcctggcaatgaagaaaacaaacagaaaacagatgtccattacagatctttggatggtgaagggaattttaactggcgatttgttttcccgtttgactaccttccagccgaacaactctgtatcgttgcgaaaaaagagcatttctggagtattgaccaaacggaatttcgaatcccacccaggctgatcattcagatatgggacaatgacaagttttctctggatgactacttgggtttcctagaacttgacttgcgtcacacgatcattcctgcaaaatcaccagagaaatgcaggttggacatgattccggacctcaaagccatgaacccccttaaagccaagacagcctccctctttgagcagaagtccatgaaaggatggtggccatgctacgcagagaaagatggcgcccgcgtaatggctgggaaagtggagatgacattggaaatcctcaacgagaaggaggccgacgagaggccagccgggaaggggcgggacgaacccaacatgaaccccaagctggacttaccaaatcgaccagaaacctccttcctctggttcaccaacccatgcaagaccatgaagttcatcgtgtggcgccgctttaagtgggtcatcatcggcttgctgttcctgcttatcctgctgctcttcgtggccgtgctcctctactctttgccgaactatttgtcaatgaagattgtaaagccaaatgtgtaacaaaggcaaaggcttcatttcaagagtcatccagcaatgagagaatcctgcctctgtagaccaacatccagtgtgattttgtgtctgagaccacaccccagtagcaggttacgccatgtcaccgagccccattgattcccagagggtcttagtcctggaaagtcaggccaacaagcaacgtttgcatcatgttatctcttaagtattaaaagttttattttctaaagtttaaatcatgtttttcaaaatatttttcaaggtggctggttccatttaaaaatcatctttttatatgtgtcttcggttctagacttcagcttttggaaattgctaaatagaattcaaaaatctctgcatcctgaggtgatatacttcatatttgtaatcaactgaaagagctgtgcattataaaatcagttagaatagttagaacaattcttatttatgcccacaaccattgctatattttgtatggatgtcataaaagtctatttaacctctgtaatgaaactaaataaaaatgtttcacctttaaaaaaaaaataacat

SEQ ID NO: 39 - DNA, 2715 bp, Homo sapiens
  misc_feature: Template ID: 235152.9
  unsure 181: a, t, c, g, or other
tccgccttccccagctgtgcactctccatccagctgtgcgctctcgtcgggagtcccagccatgtccgacgagagagaggtagccgaggcagcgaccggggaagacgcctcttcgccgcctccgaaaaccgaggcagcgagcgacccccagcatcccgcggcctccgaacgggccgccgcngccgccgcgctcgccgccactgctgcgctgcctagtgctcaccggctttggaggctacgacaaggtgaagctgcagagccggccggcagcgcccccggcccctgggcccggccagctgacgctgcgtctgcgggcctgcgggctcaacttcgcagacctcatggctaggcaggggctgtacgaccgtctcccgcctctgcctgtcactccgggcatggagggcgcgggtgttgtgatcgcagtgggcgagggagtcagcgaccgcaagggcaggagaccgggtgatggtgttgaaccggtcagggatgtggcaggaagaggtgactgtgccctcggtccagaccttcctgattcctgaggccatgacctttgaggaagctgctgccttgctcgtcaattacattacagcctacatggtcctctttgacttcggcaacctacagcctggccacagcgtcttggtacacatggctgcagggggtgtgggtatggctgccgtgcagctgtgccgtacagtggagaatgtgacagtgttcggaacggcctcggccagcaagcacgaggcactgaaggagaatggggtcacacatcccatcgactatcacacgactgactacgtggatgagatcaagaagatttcccctaaaggagtggacattgtcatggaccctctgggtgggtcagatactgccaagggctacaacctcctgaaacccatgggcaaagtcgtcacctatggaatggccaacctgctgacgggccccaaacggaacctgatggccctggcccggacatggtggaatcagttcagcgtgacagctctgcagctgctgcaggccaaccgggctgtgtgtggcttccacctgggctacctggatggtgaggtggagctggtcagtggtgtggtggcccgcctcctggctctgtacaaccagggccacatcaagccccacattgactcagtctggcccttcgagaaggtggctgatgccatgaaacagatgcaggagaagaagaatgtgggcaaggtcctcctggttccagggccagagaaggagaactagggcaagtggctgtgagaccctagagaccagcgaagggagaagttgggaagctacgttctgttggccaccagacttgcatttcagcctctgtcataatgctctgccctccctcccccgaagttctctgtggtgatgaccgctctcccctgcccctccccgcttcctgacctctgaagaggttgggaagtgaccatttggatgtctgggccctgccaaggcgacagggagggtcagagggaggccggctgcttcctgcccccaccctttccccgggcctgctgtgctgcttttgtgccaaggttagccagtcccccctgttgtgttccatgtgctttcacctctgcctcatctttcctcccgtccctgccccgccacctccccaaagaattgaaacgtcagctcaggatatggggccaatctctgtgagtccagcatgtacctgtctctccctagtgtcccttcagcctgggctgaccagtgcccgcctctgggcttgaccagttcccaatctcgtcctctgtccccaacttcttaagcacaattgggcttcttccatctccaggttttctgccattcttaaccaaggctgcctcttccaacagggcgggaatcagacctactcccctaggtcacaactctgggaaggatacagagcccccacccttcactgagttctctggatttgttctcagtgccttagcaacgaaaacctgtgcttgtgtgtgtgtggcggcggggagggaggatcctgtttcccacctccttctcctcccctgtactccccagtgccttccttgttctggtggagctggggtttctctcctccccagtcccacaacactgccaaaaatctgtgtatgtgccattgggtggggcagccccaagcctcctggggaggcagggcaaaaacaggtgccctcatcgtggtctgtgccatgtcccgtctctatggtggttgaggagaaaggcggggaagcttcctcagccttgcagatatgtgtggcatttactagccagagctctgaaaggcagtgctgtctgtttcttgtactgggaccaaagtaaaaatccaagcacattccccttgcagttaggggaggccctactgccttctcaaagcagagaggcagcttatcaaactcagcccaaaactctgtttacatgggtggggagatggagcagggaagtacagagtgggatggtcaggacctgggccattgcaaccaaaatggggacttcctgggtagggaggtcactccctctactcactgagctaggattagggagggttattgccccaaccattgcaatgggaggtggagggacaggctcagcctcctcattgtctaaatgaggcctaaatgtgtgaagtgcgatttctgcttttgtgtaccccaccaccccattaccacagctgcctttgtgtgtttgtgtcaataaaaagccaaaccctgaaaaaaaaaaaaaagg

SEQ ID NO: 40 - DNA, 2350 bp, Homo sapiens
  misc_feature: Template ID: 238213.8
agcagctgcagtcagacacctctgccctcaccatgagcctctggcagcccctggtcctggtgctcctggtgctgggctgctgctttgctgcccccagacagcgccagtccacccttgtgctcttccctggagacctgagaaccaatctcaccgacaggcagctggcagaggaatacctgtaccgctatggttacactcgggtggcagagatgcgtggagagtcgaaatctctggggcctgcgctgctgcttctccagaagcaactgtccctgcccgagaccggtgagctggatagcgccacgctgaaggccatgcgaaccccacggtgcggggtcccagacctgggcagattccaaacctttgagggcgacctcaagtggcaccaccacaacatcacctattggatccaaaactactcggaagacttgccgcgggcggtgattgacgacgcctttgcccgcgccttcgcactgtggagcgcggtgacgccgctcaccttcactcgcgtgtacagccgggacgcagacatcgtcatccagtttggtgtcgcggagcacggagacgggtatcccttcgacgggaaggacgggctcctggcacacgcctttcctcctggccccggcattcagggagacgcccatttcgacgatgacgagttgtggtccctgggcaagggcgtcgtggttccaactcggtttggaaacgcagatggcgcggcctgccacttccccttcatcttcgagggccgctcctactctgcctgcaccaccgacggtcgctccgacggcttgccctggtgcagtaccacggccaactacgacaccgacgaccggtttggcttctgccccagcgagagactctacacccgggacggcaatgctgatgggaaaccctgccagtttccattcatcttccaaggccaatcctactccgcctgcaccacggacggtcgctccgacggctaccgctggtgcgccaccaccgccaactacgaccgggacaagctcttcggcttctgcccgacccgagctgactcgacggtgatggggggcaactcggcgggggagctgtgcgtcttccccttcactttcctgggtaaggagtactcgacctgtaccagcgagggccgcggagatgggcgcctctggtgcgctaccacctcgaactttgacagcgacaagaagtggggcttctgcccggaccaaggatacagtttgttcctcgtggcggcgcatgagttcggccacgcgctgggcttagatcattcctcagtgccggaggcgctcatgtaccctatgtaccgcttcactgaggggccccccttgcataaggacgacgtgaatggcatccggcacctctatggtcctcgccctgaacctgagccacggcctccaaccaccaccacaccgcagcccacggctcccccgacggtctgccccaccggaccccccactgtccacccctcagagcgccccacagctggccccacaggtcccccctcagctggccccacaggtccccccactgctggcccttctacggccactactgtgcctttgagtccggtggacgatgcctggcaacgtgaacatcttcgacgccatcgcggagattgggaaccagctgtatttgttcaaggatgggaagtactggcgattctctgagggcagggggagccggccgcagggccccttgccttatcgccgacaagtggcccgcgctgccccgcaagctggactcggtctttgaggagccgctctccaagaagcttttcttcttctctgggcgccaggtgtgggtgtacacaggcgcgtcggtgctgggcccgaggcgtctggacaagctgggcctgggcgccgacgtggcccaggtgaccggggccctccggagtggcagggggaagatgctgctgttcagcgggcggcgcctctggaggttcgacgtgaaggcgcagatggtggatccccggagcgccagcgaggtggaccggatgttccccggggtgcctttggacacgcacgacgtcttccagtaccgagagaaagcctatttctgccaggaccgcttctactggcgcgtgagttcccggagtgagttgaaccaggtggaccaagtgggctacgtgacctatgacatcctgcagtgccctgaggactagggctcccgtcctgctttggcagtgccatgtaaatccccactgggaccaaccctggggaaggagccagtttgccggatacaaactggtattctgttctggaggaaagggaggagtggaggtgggctgggccctctcttctcacctttgttttttgttggagtgtttctaataaacttggattctctaaccttt

SEQ ID NO: 41 - DNA, 1386 bp, Homo sapiens
  misc_feature: Template ID: 242275.7
ttttccacaaaacctgtttcagtgggttatgtttttattctacgttattggtaggacagggaacagggccaagacctccacactcccctgggaagaacagtcaggagaattagatacatctaaagtgggcacaggacagaggccagatcttcctgggaggtggctgaagagacttaggcttaagccacgggggccaggccgacctggttgtttgccctgtcgaagacggtaaagtactggcggatgaagacatcacccaggatccaaagctctccagattcggtggggaggttcatgccctggaagccactgatgcagctcccctcgctctgcaggatgtaggcactgggtggcacggggtactggactccattgatggtgaagacgatgtcgggcaggctgctgatggctgagcagctgaccaccatgtcgccatctgagttctcgctggctccgatgtcgctctggatgttggcaatggggctggttgggccggtcagcagagaggtgccggtgtcaacaatggcctggcagccctcagcgcaggcgatggcctctccgttcatggtgatgctgtccacggtgatctgccagtaaccctcgacggtaacaggcacccagttcagacttccagtgtagtaagaagagtcaatgccaccaaagatcaccacgctgccactctggtcatcggcgctgaggtagacagagaagaggtcctgagaaaccaggccctggttccagatgttgtcaaagacgggtgtggccccggaggaggaaatgctggggtaggccagccccaggatgccatcgaagggagcataatacaggaaggagccaggttccgtctcgctcaggccgaagatctgattggtgtcagagatgcctccaacctggacagtgtcgtatccgaggatgcctgtcatgctgccggtgccgtaggtgatggagactgtctcgctggtggactggtaggtggaagaatcctcagggttgaagcggttgtggttggtgcaggcaagactggagcagtagactgagggcacccacaggttggaggagccggtgtcaaagacgacggtgaaatcctgggcaggagttccgatgccgatagtgccgaagtactccatatccaggtagttctccaggggctgttcatctaccagggtgggagcctcccactgggggaagtactttctggctgggttgaggttgtgcttcttcaggaagtccttcagcaggccacgctcggacagggtgcgcctcaaggacttctttctgatgagggggaccttgtacatgatgcactcagagagcgccaccagacccagcagcagcagccacttcatggttcttcccgggtcccaactcgagggagaaggcaagacg

SEQ ID NO: 42 - DNA, 2810 bp, Homo sapiens
  misc_feature: Template ID: 257576.34
gtgctgcacagtcccttttgccatgtaaggggcattcacaggtcccagggattatgacccaggtatctttggagcacttgctcagccaaccccagctccaaatgtaaaggcatgcacagtggagagccgcttaattcagcatctcctcacagggcctccagtaggcacctccttccctctcccatctgctccaggaaatgtctgctccagcttctccccttccttgttccgtgggttcccactcactgctcaagtgagtcactgggactgtcttagaatgctggcattctctgactgggacatattcatttggtaaacatctgagaactgtgtcagagcaggcaggccccgcatccctgcattcctgcatcccctccttcccagcctgactgcctgtggggcccttagctgcccctgtcctctcacctgattctgcagattcttcttcttgagcagcagctcagaaagcgcatccgccctgcgtttcaagcccagctacttcttagcttcacttccgtcaacttcaccttccctgtagtgcagtggggcattgatggtaggtctctctaagggcttggtggactttaacatgtgattctgtgattccgacttgcctgaagataccccagctcccccctcccgactatccagctgcattcctgctctggaccctgctggggctgccacacccactgcacggcagggctagagagatgtgcagcctgaccctacccctgagcctgtctgtgaaggtggagatgggcatgcacccacagcccatgaggcaaggtggtgtcctgagtgtgctgtgagttcaggcgcaggaaggcctggcttgttgcagcaggatgtccccaagcgtggtccaaaattggggctttgccacctgcagggatttcctagaaggagatccaagggtcaggaggcatttgaaaggctttcacgcatctttgtatgtggcttgattgatccttttttaaggctcttgctacccagaaatgggattctctctctcattataaaaacatttggccatcttttcttgtgtaactgtcagtgaatgtatcattttgaatgtttttcaaattaaaacagtacatttaagcccgcaaaacacaccaaagaatacaaacatagaagcaaaagccagtgccccttctgtaattccaccccaaggaagagactccaggaaagggtgcctccttcccactttctccacgtgcgggcaggcgtgcagggaggagtcctcacaaaacagggcggcgtttcacatagaactctttcattttccacacttaacattagaaacacacaaaataatgtggagggtcctaaaaagaaacagccagagttctgtgtgtgtttctgcttgcccactgaaccacagcatcggcggtgactgtcggtaaggcgcgtgagatgcagtcgcgtggaagctgtgcttaagtgatactgattttaaatcttgttccaggtctgccatcatggatgttctcgcagaagcaaatggcacctttgccttaaaccttttgaaaacactgggtaaagacaactcgaagaatgtgtttttctcacccatgagcatgtcctgtgccctggccatggtctacatgggggcaaagggaaacaccgctgcacagatggcccagatactttctttcaataaaagtggcggtggtggagacatccaccagggcttccagtctcttctcaccgaagtgaacaagactggcacgcagtacttgcttaggatggccaacaggctctttggggaaaagtcttgtgatttcctctcatcttttagagattcctgccaaaaattctaccaagcagagatggaggagcttgactttatcagcgccgtagagaagtccagaaaacacataaacacctgggtagctgaaaagacagaaggtaaaattgcggagttgctctctccgggctcagtggatccattgacaaggctggttctggtgaatgctgtctatttcagaggaaactgggatgaacagtttgacaaggagaacaccgaggagagactgtttaaagtcagcaagaatgaggagaaacctgtgcaaatgatgtttaagcaatctacttttaagaagacctatataggagaaatatttacccaaatcttggtgcttccatatgttggcaaggaactgaatatgatcatcatgcttccggacgagaccactgacttgagaacggtaacagctaagctgtgagcgaggcgtgctagcaaggagccactcgggggtgtctgctgtggctgctgtccctactttgcggtcagccgtttaacactggagcgctgctgaccatagccacgctgccactggtgtctggcatccacagcatagcacagggccctgctgggcagcagcaccctaggtcttaaagtcttcaactgtctccctctaggtggagaaagaactcacttacgagaagttcgtagaatggacgaggctggacatgatggatgaagaggaggtggaagtgtccctcccgcggtttaaactagaggaaagctacgacatggagagtgtcctgcgcaacctgggcatgactgatgccttcgagctgggcaaggcagacttctctggaatgtcccagacagacctgtctctgtccaaggtcgtgcacaagtcttttgtggaggtcaatgaggaaggcacggaggctgcagccgccacagctgccatcatgatgatgcggtgtgccagattcgtcccccgcttctgcgccgaccaccccttccttttcttcatccagcacagcaagaccaacgggattctcttctgcgg

SEQ ID NO: 43 - DNA, 1420 bp, Homo sapiens
  misc_feature: Template ID: 343903.1
gaaggatgcctcgctggggactgctgctgctgctctggggctcctgtacctttggtctcccgacagacaccaccacctttaaacggatcttcctcaagagaatgccctcaatccgagaaagcctgaaggaacgaggtgtggacatggccaggcttggtcccgagtggagccaacccatgaagaggctgacacttggcaacaccacctcctccgtgatcctcaccaactacatggacacccagtactatggcgagattggcatcggcaccccaccccagaccttcaaagtcgtctttgacactggttcgtccaatgtttgggtgccctcctccaagtgcagccgtctctacactgcctgtgtgtatcacaagctcttcgatgcttcggattcctccagctacaagcacaatggaacagaactcaccctccgctattcaacagggacagtcagtggctttctcagccaggacatcatcaccgtgggtggaatcacggtgacacagatgtttggagaggtcacggagatgcccgccttacccttcatgctggccgagtttgatggggttgtgggcatgggcttcattgaacaggccattggcagggtcacccctatcttcgacaacatcatctcccaaggggtgctaaaagaggacgtcttctctttctactacaacagagattccgagaattcccaatcgctgggaggacagattgtgctgggaggcagccgacccccagcattacgaagggaatttccactatatcaacctcatcaagactggtgtctggcagattcaaatgaagggggtgtctgtggggtcatccaccttgctctgtgaagacggctgcctggcattggtagacaccggtgcatcctacatctcaggttctaccagctccatagagaagctcatggaggccttgggagccaagaagaggctgtttgattatgtcgtgaagtgtaacgagggccctacactccccgacatctctttccacctgggaggcaaagaatacacgctcaccagcgcggactatgtatttcaggaatcctacagtagtaaaaagctgtgcacactggccatccacgccatggatatcccgccacccactggacccacctgggccctgggggccaccttcatccgaaagttctacacagagtttgatcggcgtaacaaccgcattggcttcgccttggcccgctgaggccctctgccacccaggcaggccctgccttcagccctggcccagagctggaacactctctgagatgcccctctgcctgggcttatgccctcagatggagacattggatgtggagctcctgctggatgcgtgccctgacccctgcaccagcccttccctgctttgaggacaaagagaataaagacttcatgttcacaaaaaaaaaaaaaaa

SEQ ID NO: 44 - DNA, 2114 bp, Homo sapiens
  misc_feature: Template ID: 348064.3
aattcaggatctcacccttcattccacagacacacatagcctctctgcccacctctgcttcctctaggaacacaggagttccagatcacatcgagttcaccatgaattcactcagtgaagccaacaccaagttcatgttcgacctgttccaacagttcagaaaatcaaaagagaacaacatcttctattcccctatcagcatcacatcagcattagggatggtcctcttaggagccaaagacaacactgcacaacagattaagaaggttcttcactttgatcaagtcacagagaacaccacaggaaaagctgcaacatatcatgttgataggtcaggaaatgttcatcaccagtttcaaaagcttctgactgaattcaacaaatccactgatggcatatgagctgaagatcgccaacaagctcttcggagaaaaaacgtatctatttttacaggaatatttagatgccatcaagaaattttaccagaccagtgtggaatctgttgattttgcaaatgctccagaagaaagtcgaaagaagattaactcctgggtggaaagtcaaacgaatgaaaaaattaaaaacctaattcctgaaggtaatattggcagcaataccacattggttcttgtgaacgcaatctatttcaaagggcagtgggagaagaaatttaataaagaagatactaaagaggaaaaattttggccaaacaagaatacatacaagtccatacagatgatgaggcaatacacatcttttcattttgcctcgctggaggatgtacaggccaaggtcctggaaataccatacaaaggcaaagatctaagcatgattgtgttgctgccaaatgaaatcgatggtctccagaagcttgaagagaaactcactgctgagaaattgatggaatggacaagtttgcagaatatgagagagacacgtgtcgatttacacttacctcggttcaaagtggaagagagctatgacctcaaggacacgttgagaaccatgggaatggtggatatcttcaatggggatgcagacctctcaggcatgaccgggagccgcggtctcgtgctatctggagtcctacacaaggcctttgtggaggttacagaggagggagcagaagctgcagctgccaccgctgtagtaggattcggatcatcacctacttcaactaatgaagagttccattgtaatcaccctttcctattcttcataaggcaaaataagaccaacagcatcctcttctatggcagattctcatccccgtagatgcaattagtctgtcactccatttggaaaatgttcacctgcagatgttctggtaaactgattgctggcaacaacagattctcttggctcatatttcttttctttctcatcttgatgatgatcgtcatcatcaagaatttaatgattaaaatagcatgcctttctctctttctcttaataagcccacatataaatgtactttttcttccagaaaaattctccttgaggaaaaatgtccaaaataagatgaatcacttaataccgtatcttctaaatttgaaatataattctgtttgtgacctgttttaaatgaaccaaaccaaatcatactttttctttgaatttagcaacctagaaacacacatttctttgaatttaggtgatacctaaatccttcttatgtttctaaattttgtgattctataaaacacatcatcaataaaatagtgacataaaatcatttttgctttacattttctctctggaaagggaaagtgtccagttacacacaggaaagacaatttagagatatattaatcacaaacaaaggaaaattaaaaacagagtagttcatgatgagcctggagtagaaggcatatcccagaacaggaggagccttgtaaaccacattaggaacttcctattttatgctaaagggataagaaactcattacaggctttgatggttgtttgtcaaagaggggcataaaattatcatatcttcatcttgaaaatacatctctggttactctgatatcaatggatgagaggaaagcaacagtgtggttaccatatataatcaggaatcattagagtatgggtgaatgaagagaaaacgc

SEQ ID NO: 45 - DNA, 3682 bp, Homo sapiens
  misc_feature: Template ID: 413969.1
cggcacgagcttaagttcccctgttcaaggcataccttagaggtatgggccagagaggactgggtcagagagcagggagtggctgggaaggtaagggacagtgatgggcattcctgagagaactgggtgatgacaggggaatctgaaaggggagaaagaagcatccaagagacagtgaacatagctgggggaattttaaaggtatgcattaattagagtttataataggcagggtgtgctctagcctagcgggctctgacctccttcctgttcacctttgcctttgtccagggagagtcctggcccatgccgacatcccagagctgggcagtgtgcacttcgacgaagacgagttctggactgaggggacctaccgtggggtgaacctgcgcatcattgcagcccatgaagtgggccatgctctggggcttgggcactcccgatattcccaggccctcatggcccagtctacgagggctaccggccccactttaagctgcacccagatgatgtggcagggatccaggctctctatggcaagaagagtccagtgataagggatgaggaagaagaagagacagagctgcccactgtgcccccagtgcccacagaacccagtcccatgccagacccttgcagtagtgaactggatgccatgatgctgggtgaggcccctcccctccaggctgatcctgaggcctggacaaatgggagtgacatgggacttcagcatgagcaatggaggttagaccccaggcattaatgaccatggaaggagacatgtgacatggggagggagagttcggagccaaattaaaggtggcttaggcaggcacttaccaaggctgccacgctctaagggccactagaacacatctggaaatgcagcaagatggagaaaactatattacccagattgcctgttagagagggtgcacctggttggaaggacaactaggaagccacttggaggggagggtgaggttcctaaggaggaatagctatctgcagggcttttgttttgttgagtggaccaaagctgaaacgctctgagcaacaaagcattctgagtcctctttgtctgcctttaattttctctttgaattaaagttgaatgaatttttgaagaatcagcctgcagggagagggcaaattgttagtcagcctgagatacccccaagtttctgtctacttgacctctgtctttttgacttgttgacacaccattacgctcagggccccgtgggaagacctatgctttcaagggggactatgtgtggactgtatcagattcaggaccgggccccttgttccgagtgtctgccctttgggaggggctccccggaaacctggatgctgctgtctactcgcctcgaacacaatggattcacttctttaagggtaaggaggctagttacagtgtcttacttgaggagggcctaatcttaaagaaactataaaagggagggagatgagaagtttctgaataggtggaccggaggagaccaaaagctatcacctgaggacagaggtgacttgttctttcctcacatgctctcaggagacaaggtgtggcgctacattaatttcaagatgtctcctggcttccccaagaagctgaatagggtagaacctaacctggatgcagctctctattggcctctcaaccaaaaggtgttcctctttaaggtataaagttcaaagcaagggcaaatcccttcttaggaggagtgggctaccttatactgagaagcaaagcttgcgcttgaagggagatgttctgcagctgcagtgggctgggggtggacccctgggggtcctaagctctctcctcttcctctcccctctccccacccatcccatatccagggctccgggtactggcagtgggacgagctagcccgaactgacttcagcagctaccccaaaccaatcaagggtttgtttacgggagtgccaaaccagccctcggctgctatgagttggcaagatggccgagtctacttcttcaagggcaaagtctactggcgcctcaaccagcagcttcgagtagagaaaggctatcccagaaatatttcccacaactggatgcactgtcgtccccggactatagacactaccccatcaggtgggaataccactccctcaggtacgggcataaccttggataccactctctcagccacagaaaccacgtttgaatactgactgctcacccacagacacaatcttggacattaacccctgaggctccaccacccaccctttcatttccccccagaagcctaaggcctaatagcggaatgaaatacctgtctgctcagtagaaccttgcaggtgctgtagcaggcgcaagaccgtagatctcaggcctctaacacttccaactccagccaccactttcctgtgcattttcactcctgagaagtgctcccctaactcagatcccctaacttagatttggcccccaactccatttcctgtctgtcttagacagcccttccaactgtgtcatctcttctctggaggtcaatggtggagggagatgcctgggtcctgttcttcctacataaaatgcaagaaaacagcatggccagtaaactgagcaagggccttggaatccttgagaatcacatttatgtgcttatgattacgggcaagctaattaaccttgttgaatctcagattccccatttgcaacattaggttaagaccagtactgcaggattgttgcactaaatgaaatactgtatgtgaagtgcctggcacagtgtctggtacatttgtgtttaataaaagctaactccatgttcataagagaggactgaacagctcttcctctagctgtctggctgtataactcttacagtagtctgtataataagggcatctctattagatctttaggggacagaggatttgtcaagatggttagctctttgttttggggtgcagagaaagaaaagagcagcaacagcagaggctggactccctggttcagtatttaatgccattttattcacatgctcccatgttctccctccctcccattgtagccttgctgcccaggggagggatatgtcttcctttatgcatctgggaaaccaggaacagaccctgcgcaggagagtcagagggggaagagttagaatgggtcagtggctggaacaaagttctggttaaggaggaaattagtgccacccacggtgagaagcagagaaggcacttgcatcctatgcagccctgaagaccaggctcctttgggcaaaaggcaagactctggcaggtgggtcaatgctctctccttggagcaagaagccagcttttggggaaggcaggtcctgaggcaggcactgccctgtggtcttccccaggttgaggagagaagtggaagccccatggaagacagtgctcccagctgaggtaggaggcggaggtgggggtgggggtagtttaagcctatggggcccagggggaaaggccaaacagaaacccaactaccccctaatgaagggcctggaggttggggtatcttggagctcctcagagcccttcttcccatcaaaaaggtatcaaatgccttggaagctccctgatcctacaaaacaaaaaaatgcttatttttaccactgtgaggcaagctgaggtgaacatttaaaaggctatttcaagacgaggtgcg

SEQ ID NO: 46 - DNA, 2336 bp, Homo sapiens
  misc_feature: Template ID: 416874.3
gaccgcagccccggagcccgggccagggtccacctgtccccgcagcgccggctcgcgccctcctgccgcagccaccgagccgccgtctagcgccccgacctcgccaccatgagagccctgctggcgcgcctgcttctctgcgtcctggtcgtgagcgactccaaaggcagcaatgaacttcatcaagttccatcgaactgtgactgtctaaatggaggaacatgtgtgtccaacaagtacttctccaacattcactggtgcaactgcccaaagaaattcggagggcagcactgtgaaatagataagtcaaaaacctgctatgaggggaatggtcacttttaccgaggaaaggccagcactgacaccatgggccggccctgcctgccctggaactctgccactgtccttcagcaaacgtaccatgcccacagatctgatgctcttcagctgggcctggggaaacataattactgcaggaacccagacaaccggaggcgaccctggtgctatgtgcaggtgggcctaaagccgcttgtccaagagtgcatggtgcatgactgcgcagatggaaaaaagccctcctctcctccagaagaattaaaatttcagtgtggccaaaagactctgaggccccgctttaagattattgggggagaattcaccaccatcgagaaccagccctggtttgcggccatctacaggaggcaccgggggggctctgtcacctacgtgtgtggaggcagcctcatcagcccttgctgggtgatcagcgccacacactgcttcattgattacccaaagaaggaggactacatcgtctacctgggtcgctcaaggcttaactccaacacgcaaggggagatgaagtttgaggtggaaaacctcatcctacacaaggactacagcgctgacacgcttgctcaccacaatgacattgccttgctgaagatccgttccaaggagggcaggtgtgcgcagccatcccggactatacagaccatctgcctgccctcgatgtataacgatccccagtttggcacaagctgtgagatcactggctttggaaaagagaattctaccgactatctctatccggagcagctgaaaatgactgttgtgaagctgatttcccaccgggagtgtcagcagccccactactacggctctgaagtcaccaccaaaatgctgtgtgctgctgacccacagtggaaaacagattcctgccagggagactcagggggacccctcgtctgttccctccaaggccgcatgactttgactggaattgtgagctggggccgtggatgtgccctgaaggacaagccaggcgtctacacgagagtctcacacttcttaccctggatccgcagtcacaccaaggaagagaatggcctggccctctgagggtccccagggaggaaacgggcaccacccgctttcttgctggttgtcatttttgcagtagagtcatctccatcagctgtaagaagagactgggaagataggctctgcacagatggatttgcctgtgccacccaccagggcgaacgacaatagctttaccctcaggcataggcctgggtgctggctgcccagacccctctggccaggatggaggggtggtcctgactcaacatgttactgaccagcaacttgtctttttctggactgaagcctgcaggagttaaaaagggcagggcatctcctgtgcatgggtgaagggagagccagctcccccgacggtgggcatttgtgaggcccatggttgagaaatgaataatttcccaattaggaagtgtaacagctgaggtctcttgagggagcttagccaatgtgggagcagcggtttggggagcagagacactaacgacttcagggcagggctctgatattccatgaatgtatcaggaaatatatatgtgtgtgtatgtttgcacacttgtgtgtgggctgtgagtgtaagtgtgagtaagagctggtgtctgattgttaagtctaaatatttccttaaactgtgtggactgtgatgccacacagagtggtctttctggagaggttataggtcactcctggggcctcttgggtcccccacgtgacagtgcctgggaatgtattattctgcagcatgacctgtgaccagcactgtctcagtttcactttcacatagatgtccctttcttggccagttatcccttccttttagcctagttcatccaatcctcactgggtggggtgaggaccactccttacactgaatatttatatttcactatttttatttatatttttgtaattttaaataaaagtgatcaataaaatgtgatttttctgatgac

SEQ ID NO: 47 - DNA, 1248 bp, Homo sapiens
  misc_feature: Template ID: 437025.25
ccttagtactgcggccgtgtgggtgagttggctgccggtgagttgggtgccggtggagtcgtgttggtcctcagaatccccgcgtagccgctggcctcctcctaccctcgccatgtttcttacccggtctgagtacgacaggggcgtgaatactttttctcccgaaggaagattatttcaagtggaatatgccattgaggctatcaagcttggttctacagccattgggatccagacatcagagggtgtgtgcctagctgtggagaagagaattacttccccactgatggagcccagcagcattgagaaaattgtagagattgatgctcacataggttgtgccatgagtgggctaattgctgatgctaagactttaattgataaagccagagtggagacacagaaccactggttcacctacaatgagacaatgacagtggagagtgtgacccaagctgtgtccaatctggctttgcagtttggagaagaagatgcagatccaggtgccatgtctcgtccctttggagtagcattattatttggaggagttgatgagaaaggaccccagctgtttcatatggacccatctgggacctttgtacagtgtgatgctcgagcaattggctctgcttcagagggtgcccagagctccttgcaagaagtttaccacaagtctatgactttgaaagaagccatcaagtcttcactcatcatcctcaaacaagtaatggaggagaagctgaatgcaacaaacattgagctagccacagtgcagcctggccagaatttccacatgttcacaaaggaagaacttgaagaggttatcaaggacatttaaggaatcctgatcctcagaacttctctgggacaatttcagttctaataatgtccttaaattttatttccagctcctgttccttggaaaatctccattgtatgtgcattttttaaatgatgtctgtacataaaggcagttctgaaataaagaaaattttaaaataagactttaattgataaagccagagtggagacacagaaccactggttcacctacaatgagacaatgacagtggagagtgtgacccaagctgtgtccaatctggctttgcagtttggagaagaagatgcagatccaggtgccatgtctcgtccctttggagtagcattattatttggaggagttgatgagaaaggacccagctgtctcatatggacccatctggggactttgtacagtgtgatgctcga

SEQ ID NO: 48 - DNA, 2006 bp, Homo sapiens
  misc_feature: Template ID: 478620.78
gcggcggcgcccgcagcaatcacagcagtgccgacgtcgtgggtgtttggtgtgaggctgcgagccgccgcgagttctcacggtcccgccggcgccaccaccgcggtcactcaccgccgccgccgccaccactgccaccacggtcgcctgccacaggtgtctgcaattgaactccaaggtgcagaatggtttggaaagtagctgtattcctcagtgtggccctgggcattggtgccgttcctatagatgatcctgaagatggaggcaagcactgggtggtgatcgtggcaggttcaaatggctggtataattataggcaccaggcagacgcgtgccatgcctaccagatcattcaccgcaatgggattcctgacgaacagatcgttgtgatgatgtacgatgacattgcttactctgaagacaatcccactccaggaattgtgatcaacaggcccaatggcacagatgtctatcagggagtcccgaaggactacactggagaggatgttaccccacaaaatttccttgctgtgttgagaggcgatgcagaagcagtgaagggcataggatccggcaaagtcctgaagagtggcccccaggatcacgtgttcatttacttcactgaccatggatctactggaatactggtttttcccaatgaagatcttcatgtaaaggacctgaatgagaccatccattacatgtacaaacacaaaatgtaccgaaagatggtgttctacattgaagcctgtgagtctgggtccatgatgaaccacctgccggataacatcaatgtttatgcaactactgctgccaaccccagagagtcgtcctacgcctgttactatgatgagaagaggtccacgtacctgggggactggtacagcgtcaactggatggaagactcggacgtggaagatctgactaaagagaccctgcacaagcagtaccacctggtaaaatcgcacaccaacaccagccacgtcatgcagtatggaaacaaaacaatctccaccatgaaagtgatgcagtttcagggtatgaaacgcaaagccagttctcccgtccccctacctccagtcacacaccttgacctcacccccagccctgatgtgcctctcaccatcatgaaaaggaaactgatgaacaccaatgatctggaggagtccaggcagctcacggaggagatccagcggcatctggatgccaggcacctcattgagaagtcagtgcgtaagatcgtctccttgctggcagcgtccgaggctgaggtggagcagctcctgtccgagagagccccgctcacggggcacagctgctacccagaggccctgctgcacttccggacccactgcttcaactggcactcccccacgtacgagtatgcgttgagacatttgtacgtgctggtcaacctttgtgagaagccgtatccgcttcacaggataaaattgtccatggaccacgtgtgccttggtcactactgaagagctgcctcctggaagcttttccaagtgtgagcgccccaccgactgtgtgctgatcagagactggagaggtggagtgagaagtctccgctgctcgggccctcctggggagcccccgctccagggctcgctccaggaccttcttcacaagatgacttgctcgctgttacctgcttccccagtcttttctgaaaaactacaaattagggtgggaaaagctctgtattgagaagggtcatatttgctttctaggaggtttgttgttttgcctgttagttttgaggagcaggaagctcatgggggcttctgtagcccctctcaaaaggagtctttattctgagaatttgaagctgaaacctctttaaatcttcagaatgattttattgaagagggccgcaagccccaaatggaaaactgtttttagaaaatatgatgatttttgattgcttttgtatttaattctgcaggtgttcaagtcttaaaaaataaagatttataacagaacccaaatattcacgt

SEQ ID NO: 49 - DNA, 1965 bp, Homo sapiens
  misc_feature: Template ID: 902393.23
cattgcatttggcacccggaggggctcaagctgacgccgcacttcacgtgacgccggtgccgggccgaacatggcggcggccaccggaccctcgttttggctggggaatgaaaccctgaaggtgccgctggcgctctttgccttgaaccggcagcgcctgtgtgagcggctgcggaagaaccctgctgtgcaggccggctccatcgtggtcctgcagggcggggaggagactcagcgctactgcaccgacaccggggtcctcttccgccaggagtccttctttcactgggcgttcggtgtcactgagccaggctgctatggtgtcatcgatgttgacactgggaagtcgaccctgtttgtgcccaggcttcctgccagccatgccacctggatgggaaagatccattccaaggagcacttcaaggagaagtatgccgtggacgacgtccagtacgtagatgagattgccagcgtcctgacgtcacagaagccctctgtcctcctcactttgcgtggcgtcaacacggacagcggcagtgtctgcagggaggcctcctttgacggcatcagcaagttcgaagtcaacaataccattcttcacccagagatcgttgagtgccgagtgtttaagacggatatggagctggaggttctgcgctataccaataaaatctccagcgaggcccaccgtgaggtaatgaaggctgtaaaagtgggaatgaaagaatatgagttggaaagcctcttcgagcactactgctactcccggggcggcatgcgccacagctcctacacctgcatctgcggcagtggtgagaactcagccgtgctacactacggacacgccggagctcccaacgaccgaacgatccagaatggggatatgtgcctgttcgacatgggcggtgagtattactgcttcgcttccgacatcacctgctcctttcccgccaacggcaagttcactgcagaccagaaggccgtctatgaggcagtgctgcggagctcccgtgccgtcatgggtgccatgaagccaggtgtctggtggcctgacatgcaccgcctggctgaccgcatccacctggaggagctggcccacatgggcatcctgagcggcagcgtggacgccatggtccaggctcacctgggggccgtgtttatgcctcacgggcttggccacttcctgggcattgacgtgcacgacgtgggaggctacccagagggcgtggagcgcatcgacgagcccggcctgcggagcctgcgcactgcacggcacctgcagccaggcatggtgctcaccgtggagccgggcatctacttcatcgaccacctcctggatgaggccctggcggacccggcccgcgcctccttccttaaccgcgaggtcctgcagcgctttcgcggttttggcggggtccgcatcgaggaggacgtcgtggtgactgacagcggcatagagctgctgacctgcgtgccccgcactgtggaagagattgaagcatgcatggcaggctgtgacaaggcctttacccccttctctggccccaagtagagccagccagaaatcccagcgcacctgggggcctggccttgcaacctcttttcgtgatgggcagcctgctggtcagcactccagtagcgagagacggcacccagaatcagatcccagcttcggcatttgatcagaccaaacagtgctgtttcccggggaggaaacacttttttaattacccttttgcaggctcccacctttaatctgttttataccttgcttattaaatgagcgacttaaaatgattgaaaataatgctgttctttagtagcaactaaaatgtgtcttgctgtcatttatattccttttcccaggaaagaagcatttctgatactttactttctgtcaaaaatcaatatgcagaatggcatttgcaataaaaggtttcctaaaatggtcaaaaaaaaaaaaaa

SEQ ID NO: 50 - DNA, 2930 bp, Homo sapiens
  misc_feature: Template ID: 992309.26
  unsure 2922-2923, 2926-2927: a, t, c, g, or other
gggttttgaaggtggcgtctcatctgtctacctctgggatccggatcatggctttgctggagtgatcctcataaagaaggctggagatggatcaaagaagatcaaaggctgctgggattccatccacgtggtagaagtgcaggagaaatccagcggtcgcaccgcccattacaagttgacctccacggtgatgctgtggctgcagaccaacaaatctggctctggcaccatgaacctcggaggcagccttaccagacagatggagaaggatgaaactgtgagtgactgctccccacacatagccaacatcgggcgcctggtagaggacatggaaaataaaatcagaagtacgctgaacgagatctactttggaaaaacaaaggatatcgtcaatgggctgaggtctgtgcagacttttgcagacaaatcaaaacaagaagctctgaagaatgacctggtggaggctttgaagagaaagcagcaatgctaaacctctgtttcatgctaaccagacacgccgtgcactcgttagattcctttcttagaaaactcgttttctgctcccttccctcgtcccttccctccccgacaggtcacataacagctgcatcattgaccgcacagcgccatctctccctgagaataaagccgatagccaccaagaactacaacaccaacatcaccacagagaccagcaagattctgctgcagaagaacatgcaaatagccaaccacaccctgaagtacggcacccaggccaggaagtttgatgtgaaccagttgcagaacaccactatcaagcggatcataaagaaggttcaggacctagaacgggcagcactgcctgcccaggagctggaggagtacaacaagatcctgttggatatggaaaccacctacagcgtggccactgtgtgccacccgaatggcagctgcctgcagctcgagccagatctgacgaatgtgatggccacgtcccggaaatatgaagacctgttatgggcatgggagggctggcgagacaaggcggggagagccatcctccagttttacccgaaatacgtggaactcatcaaccaggctgcccggctcaatggctatgtagatgcaggggactcgtggaggtctatgtacgagacaccatccctggagcaagacctggagcggctcttccaggagctgcagccactctacctcaacctgcatgcctacgtgcgccgggccctgcaccgtcactacggggcccagcacatcaacctggaggggcccattcctgctcacctgctggggaacatgtgggcgcagacctggtccaacatctatgacttggtggtgcccttcccttcagccccctcgatggacaccacagaggctatgctaaagcagggctggacgcccaggaggatgtttaaggaggctgatgatttcttcacctccctggggctgctgcccgtgcctcctgagttctggaacaagtcgatgctggagaagccaaccgacgggcgggaggtggtctgccacgcctcggcctgggacttctacaacggcaaggacttccggatcaagcagtgcaccaccgtgaacttggaggacctggtggtggcccaccacgaaatgggccacatccagtatttcatgcagtacaaagacttacctgtggccttgagggagggtgccaaccccggcttccatgaggccattggggacgtgctagccctctcagtgtctacgcccaagcacctgcacagtctcaacctgctgagcagtgagggtggcagcgacgagcatgacatcaactttctgatgaagatggcccttgacaagatcgcctttatccccttcagctacctcgtcgatcagtggcgctggagggtatttgatggaagcatcaccaaggagaactataaccaggagtggtggagcctcaggctgaagtaccagggcctctgccccccagtgcccaggactcaaggtgactttgacccaggggccaagttccacattccttctagcgtgccttacatcaggtactttgtcagcttcatcatccagttccagttccacgaggcactgtgccaggcagctggccacacgggccccctgcacaagtgtgacatctaccagtccaaggaggccgggcagcgcctggcgaccgccatgaagctgggcttcagtaggccgtggccggaagccatgcagctgatcacgggccagcccaacatgagcgcctcggccatgttgagctacttcaagccgctgctggactggctccgcacggagaacgagctgcatggggagaagctgggctggccgcagtacaactggacgccgaactccgctcgctcagaagggcccctcccagacagcggccgcgtcagcttcctgggcctggacctggatgcgcagcaggcccgcgtgggccagtggctgctgctcttcctgggcatcgccctgctggtagccaccctgggcctcagccagcggctcttcagcatccgccaccgcagcctccaccggcactcccacgggccccagttcggctccgaggtggagctgagacactcctgaggtgacccggctgggtcggccctgcccaagggcctcccaccagagactgggatgggaacactggtgggcagctgaggacacaccccacaccccagcccaccctgctcctcctgccctgtccctgtccccctgccctcccagtcctccagaccaccagccgccccagccccttctcccagcacacggctgcctgacactgagccccacctctccaagtctctctgtgaatacaattaaaggtcctggactgcccatctgagtctgtgttcctcacagggaagccaaggacaaggagaaggttgctttcctggattctggaaattcaaatgggttccgttacttaggtccatcctnnaanntag

SEQ ID NO: 51 - DNA, 4301 bp, Homo sapiens
  misc_feature: Template ID: 992309.27
  unsure 4293-4294, 4297-4298: a, t, c, g, or other
gcgagcaccgcgcaccgcgtcatgggggccgcctcgggccgccgggggccggggctgtgtgccgtgccgctgctgttgctgctgccgccgcagcccgccctggcgttggaccctgggctgcagcccggcaacttttctgctgacgaggccggggcgcagctcttcgcgcagagctacaactccagcgccgaacaggtgctgttccagagcgtggccgccagctgggcgcacgacaccaacatcaccgcggagaatgcaaggcgccaggaggaagcagccctgctcagccaggagtttgcggaggcctggggccagaaggccaaggagctgtatgaaccgatctggcagaacttcacggacccgcagctgcgcaggatcatcggagctgtgcgcaccctgggctctgccaacctgcccctggctaagcggcagcagtacaacgccctgctaagcaacatgagcaggatctactccaccgccaaggtctgcctccccaacaagactgccacctgctggtccctggacccagatctcaccaacatcctggcttcctcgcgaagctacgccatgctcctgtttgcctgggagggctggcacaatgctgcgggcatcccgctgaaaccgctgtacgaggatttcactgccctcagcaatgaagcctacaagcaggacggcttcacagacacgggggcctactggcgctcctggtacaactcccccaccttcgaggacgatctggaacacctctaccaacagctagagcccctctacctgaacctccatgccttcgtccgccgcgcactgcatcgccgatacggagacagatacatcaacctcaggggacccatccctgctcatctgctgggagacatgtgggcccagagctgggaaaacatctacgacatggtggtgcctttcccagacaagcccaacctcgatgtcaccagtactatgctgcagcagggctggaacgccacgcacatgttccgggtggcagaggagttcttcacctccctggagctctcccccatgcctcccgagttctgggaagggtcgatgctggagaagccggccgacgggcgggaagtggtgtgccacgcctcggcttgggacttctacaacaggaaagacttcaggatcaagcagtgcacacgggtcacgatggaccagctctccacagtgcaccatgagatgggccatatacagtactacctgcagtacaaggatctgcccgtctccctgcgtcggggggccaaccccggcttccatgaggccattggggacgtgctggcgctctcggtctccactcctgaacatctgcacaaaatcggcctgctggaccgtgtcaccaatgacacggaaagtgacatcaattacttgctaaaaatggcactggaaaaaattgccttcctgccctttggctacttggtggaccagtggcgctggggggtctttagtgggcgtacccccccttcccgctacaacttcgactggtggtatcttcgaaccaagtatcaggggatctgtcctcctgttacccgaaacgaaacccactttgatgctggagctaagtttcatgttccaaatgtgacaccatacatcaggtactttgtgagttttgtcctgcagttccagttccatgaagccctgtgcaaggaggcaggctatgagggcccactgcaccagtgtgacatctaccggtccaccaaggcaggggccaagctccggaaggtgctgcaggctggctcctccaggccctggcaggaggtgctgaaggacatggtcggcttagatgccctggatgcccagccgctgctcaagtacttccagccagtcacccagtggctgcaggagcagaaccagcagaacggcgaggtcctgggctggcccgagtaccagtggcacccgccgttgcctgacaactacccggagggcatagacctggtgactgatgaggctgaggccagcaagtttgtggaggaatatgaccggacatcccaggtggtgtggaacgagtatgccgaggccaactggaactacaacaccaacatcaccacagagaccagcaagattctgctgcagaagaacatgcaaatagccaaccacaccctgaagtacggcacccaggccaggaagtttgatgtgaaccagttgcagaacaccactatcaagcggatcataaagaaggttcaggacctagaacgggcagcactgcctgcccaggagctggaggagtacaacaagatcctgttggatatggaaaccacctacagcgtggccactgtgtgccacccgaatggcagctgcctgcagctcgagccagatctgacgaatgtgatggccacgtcccggaaatatgaagacctgttatgggcatgggagggctggcgagacaaggcggggagagccatcctccagttttacccgaaatacgtggaactcatcaaccaggctgcccggctcaatggctatgtagatgcaggggactcgtggaggtctatgtacgagacaccatccctggagcaagacctggagcggctcttccaggagctgcagccactctacctcaacctgcatgcctacgtgcgccgggccctgcaccgtcactacggggcccagcacatcaacctggaggggcccattcctgctcacctgctggggaacatgtgggcgcagacctggtccaacatctatgacttggtggtgcccttcccttcagccccctcgatggacaccacagaggctatgctaaagcagggctggacgcccaggaggatgtttaaggaggctgatgatttcttcacctccctggggctgctgcccgtgcctcctgagttctggaacaagtcgatgctggagaagccaaccgacgggcgggaggtggtctgccacgcctcggcctgggacttctacaacggcaaggacttccggatcaagcagtgcaccaccgtgaacttggaggacctggtggtggcccaccacgaaatgggccacatccagtatttcatgcagtacaaagacttacctgtggccttgagggagggtgccaaccccggcttccatgaggccattggggacgtgctagccctctcagtgtctacgcccaagcacctgcacagtctcaacctgctgagcagtgagggtggcagcgacgagcatgacatcaactttctgatgaagatggcccttgacaagatcgcctttatccccttcagctacctcgtcgatcagtggcgctggagggtatttgatggaagcatcaccaaggagaactataaccaggagtggtggagcctcaggctgaagtaccagggcctctgccccccagtgcccaggactcaaggtgactttgacccaggggccaagttccacattccttctagcgtgccttacatcaggtactttgtcagcttcatcatccagttccagttccacgaggcactgtgccaggcagctggccacacgggccccctgcacaagtgtgacatctaccagtccaaggaggccgggcagcgcctggcgaccgccatgaagctgggcttcagtaggccgtggccggaagccatgcagctgatcacgggccagcccaacatgagcgcctcggccatgttgagctacttcaagccgctgctggactggctccgcacggagaacgagctgcatggggagaagctgggctggccgcagtacaactggacgccgaactccgctcgctcagaagggcccctcccagacagcggccgcgtcagcttcctgggcctggacctggatgcgcagcaggcccgcgtgggccagtggctgctgctcttcctgggcatcgccctgctggtagccaccctgggcctcagccagcggctcttcagcatccgccaccgcagcctccaccggcactcccacgggccccagttcggctccgaggtggagctgagacactcctgaggtgacccggctgggtcggccctgcccaagggcctcccaccagagactgggatgggaacactggtgggcagctgaggacacaccccacaccccagcccaccctgctcctcctgccctgtccctgtccccctgccctcccagtcctccagaccaccagccgccccagccccttctcccagcacacggctgcctgacactgagccccacctctccaagtctctctgtgaatacaattaaaggtcctggactgcccatctgagtctgtgttcctcacagggaagccaaggacaaggagaaggttgctttcctggattctggaaattcaaatgggttccgttacttaggtccatcctnnaanntag

SEQ ID NO: 52 - DNA, 1927 bp, Homo sapiens
  misc_feature: Template ID: 153659.2
gggcagctccaccctgggagggactgtggcccaggtactgcccgggtgctactttatgggcagcagctcagttgagttagagtctggaagacctcagaagacctcctgtcctatgaggccctccccatggctttagggggattataaaactaatcatcaaagccaagaaggcaagagcaagcatgtaccgctgaaaacacaagataactgcataagtaatgactttcagtgcagattcatagctaacccataaactgctggggcaaaaatcatcttggaaggctctgaacctcagaaaggattcacaagacgatctgccgaccctctgggagaaaatccagcaagatgcaagccttcagaatctgggatgttaaccagaagaccttctatctgaggaacaaccaactagttgctggatacttgcaaggaccaaatgtcaatttagaagaaaagatagatgtggtacccattgagcctcatgctctgttcttgggaatccatggagggaagatgtgcctgtcctgtgtcaagtctggtgatgagaccagactccagctggaggcagttaacatcactgacctgagcgagaacagaaagcaggacaagcgcttcgccttcatccgctcagacagcggccccaccaccagttttgagtctgccgcctgccccggttggttcctctgcacagcgatggaagctgaccagcccgtcagcctcaccaatatgcctgacgaaggcgtcatggtcaccaaattctacttccaggaggacgagtagtactgcccaggcctgcctgttcccattcttgcatggcaaggactgcagggactgccagtccccctgccccagggctcccggctatgggggcactgaggaccagccattgaggggtggaccctcagaaggcgtcacaagaacctggtcacaggactctgcctcctcttcaactgaccagcctccatgctgcctccagaatggtctttctaatgtgtgaatcagagcacagcagcccctgcacaaagcccttccatgtcgcctctgcattcaggatcaaaccccgaccacctgcccaacctgctctcctcttgccactgcctcttcctccctcattccaccttcccatgccctggatccatcaggccacttgatgacccccaaccaagtggctcccacaccctgttttacaaaaaagaaaagaccagtccatgagggaggtttttaagggtttgtggaaaatgaaaattaggatttcatgatttttttttttcagtccccgtgaaggagagcccttcatttggagattatgttctttcggggagaggctgaggacttaaaatattcctgcatttgtgaaatgatggtgaaagtaagtggtagcttttcccttctttttcttctttttttgtgatgtcccaacttgtaaaaattaaaagttatggtactatgttagccccataattttttttttccttttaaaacacttccataatctggactcctctgtccaggcactgctgcccagcctccaagctccatctccactccagattttttacagctgcctgcagtactttacctcctatcagaagtttctcagctcccaaggctctgagcaaatgtggctcctgggggttctttcttcctctgctgaaggaataaattgctccttgacattgtagagcttctggcacttggagacttgtatgaaagatggctgtgcctctgcctgtctcccccaccgggctgggagctctgcagagcaggaaacatgactcgtatatgtctcaggtccctgcagggccaagcacctagcctcgctcttggcaggtactcagcgaatgaatgctgtatatgttgggtgcaaagttccctacttcctgtgacttcagctctgttttacaataaaatcttgaaaatgctaaaaaaa

SEQ ID NO: 53 - DNA, 723 bp, Homo sapiens
  misc_feature: Template ID: 242114.46
ggccgctgcttctttcccgagcttggaacttcgttatccgcgatgcgtttcctggcagctacattcctgctcctggcgctcagcaccgctgcccaggccgaaccggtgcagttcaaggactgcgatattcagtctaaaagcagcaaggccgtggtgcatggcatcctgatgggcgtcccagttccctttcccattcctgagcctgatggttgtaagagtggaattaactgccctatccaaaaagacaagacctatagctacctgaataaactaccagtgaaaagcgaatatccctctataaaactggtggtggagtggcaacttcaggatgacaaaaaccaaagtctcttctgctgggaaatcccagtacagatcgtttctcatctctaagtgcctcattgagttcggtgcatctggccaatgagtctgctgagactcttgacagcacctccagctctgctgcttcaacaacagtgacttgctctccaatggtatccagtgattcgttgaagaggaggtgctctgtagcagaaactgagctccgggtggctggttctcagtggttgtctcatgtctctttttctgtcttaggtggtttcattaaatgcagcacttggttagcagatgtttaattttttttttaacaacattaacttgtggcctctttctacacctggaaatttactcttgaataaataaaaactcgtttgtcttgtcttctgc

SEQ ID NO: 54 - DNA, 627 bp, Homo sapiens
  misc_feature: Template ID: 242114.47
gggcccgccccgacaggtttgtcttgtgaccgcgggcggccgctgcttctttcccgagcttggaacttcgttatccgcgatgcgtttcctggcagctacattcctgctcctggcgctcagcaccgctgcccaggccgaaccggtgcagttcaaggactgcggttctgtggatggagttataaaggaagtgaatgtgagcccatgccccacccaaccctgccagctgagcaaaggacagtcttacagcgtcaatgtcaccttcaccagcaatattcagtctaaaagcagcaaggccgtggtgcatggcatcctgatgggcgtcccagttccctttcccattcctgagcctgatggttgtaagagtggaattaactgccctatccaaaaagacaagacctatagctacctgaataaactaccagtgaaaagcgaatatccctctataaaactggtggtggagtggcaacttcaggatgacaaaaaccaaagtctcttctgctgggaaatcccagtacagatcgtttctcatctctaagtgttttaacaacattaacttgtggcctctttctacacctggaaatttactcttgaataaataaaaactcgtttgtcttgtaaaaaaaaaaa

SEQ ID NO: 55 - DNA, 521 bp, Homo sapiens
  misc_feature: Template ID: 242114.48
  unsure 492, 496, 505, 509: a, t, c, g, or other
ctggtaacacctttttaataggtcaaagtaactgtacagttcattatattcttcctgagaataatttatatcccccaacaaactaaagggagggtatattttttcaaaattaacagaatggatggtgtaactggacatcaaaagaaaaccaaattcctgttttgcttcattctctcctgggaagacagatacaaggaagggttagttaactccagtggctgtaaaatagtcaacatggctttaatctttctttataaattatataaaaatggaaaaaggggatggttctggaacttctcctcaatgcagtttggaggtgctctgtagcagaaactgagctccgggtggctggttctcagtggttgtctcatgtctctttttctgtcttaggtggtttcattaaatgcagcacttggttagcagatgtttaattttttttttaacaacattaacttgtgggcctctttcttacaacctgggaaattttactcnttgnaataaaatnaaanaacttcgttttg

SEQ ID NO: 56 - DNA, 5703 bp, Homo sapiens
  misc_feature: Template ID: 244973.9
aacacttactaaatggaataagtttgcaccggttaattaaatatcttttttgtaagtattcacagttcatggcccgggcagtggctcctggaagaggaacaagtgtgggaaaagggagaggaagccggagctaaatgacaggatgcaggcgacttgagacacaaaaagagaagcgttcctctcggatccaggcattgcctcgctgctttcttttctccaagacgggctgaggattgtacagctctaggcggagttggggctcttcggatcgcttagattctcctctttgctgcatttccccccacgtcctcgttctcccgcgtctgcctgcggacccggagaagggagaatggagagggggctgccgctcctctgcgccgtgctcgccctcgtcctcgccccggccggcgcttttcgcaacgataaatgtggcgatactataaaaattgaaagccccgggtaccttacatctcctggttatcctcattcttatcacccaagtgaaaaatgcgaatggctgattcaggctccggacccataccagagaattatgatcaacttcaaccctcacttcgatttggaggacagagactgcaagtatgactacgtggaagtcttcgatggagaaaatgaaaatggacattttaggggaaagttctgtggaaagatagcccctcctcctgttgtgtcttcagggccatttctttttatcaaatttgtctctgactacgaaacacatggtgcaggattttccatacgttatgaaattttcaagagaggtcctgaatgttcccagaactacacaacacctagtggagtgataaagtcccccggattccctgaaaaatatcccaacagccttgaatgcacttatattgtctttgcgccaaagatgtcagagattatcctggaatttgaaagctttgacctggagcctgactcaaatcctccaggggggatgttctgtcgctacgaccggctagaaatctgggatggattccctgatgttggccctcacattgggcgttactgtggacagaaaacaccaggtcgaatccgatcctcatcgggcattctctccatggttttttacaccgacagcgcgatagcaaaagaaggtttctcagcaaactacagtgtcttgcagagcagtgtctcagaagatttcaaatgtatggaagctctgggcatggaatcaggagaaattcattctgaccagatcacagcttcttcccagtatagcaccaactggtctgcagagcgctcccgcctgaactaccctgagaatgggtggactcccggagaggattcctaccgagagtggatacaggtagacttgggccttctgcgctttgtcacggctgtcgggacacagggcgccatttcaaaagaaaccaagaagaaatattatgtcaagacttacaagatcgacgttagctccaacggggaagactggatcaccataaaagaaggaaacaaacctgttctctttcagggaaacaccaaccccacagatgttgtggttgcagtattccccaaaccactgataactcgatttgtccgaatcaagcctgcaacttgggaaactggcatatctatgagatttgaagtatacggttgcaagataacagattatccttgctctggaatgttgggtatggtgtctggacttatttctgactcccagatcacatcatccaaccaaggggacagaaactggatgcctgaaaacatccgcctggtaaccagtcgctctggctgggcacttccacccgcacctcattcctacatcaatgagtggctccaaatagacctgggggaggagaagatcgtgaggggcatcatcattcagggtgggaagcaccgagagaacaaggtgttcatgaggaagttcaagatcgggtacagcaacaacggctcggactggaagatgatcatggatgacagcaaacgcaaggcgaagtcttttgagggcaacaacaactatgatacacctgagctgcggacttttccagctctctccacgcgattcatcaggatctaccccgagagagccactcatggcggactggggctcagaatggagctgctgggctgtgaagtggaagcccctacagctggaccgaccactcccaacgggaacttggtggatgaatgtgatgacgaccaggccaactgccacagtggaacaggtgatgacttccagctcacaggtggcaccactgtgctggccacagaaaagcccacggtcatagacagcaccatacaatcagagtttccaacatatggttttaactgtgaatttggctggggctctcacaagaccttctgccactgggaacatgacaatcacgtgcagctcaagtggagtgtgttgaccagcaagacgggacccattcaggatcacacaggagatggcaacttcatctattcccaagctgacgaaaatcagaagggcaaagtggctcgcctggtgagccctgtggtttattcccagaactctgcccactgcatgaccttctggtatcacatgtctgggtcccacgtcggcacactcagggtcaaactgcgctaccagaagccagaggagtacgatcagctggtctggatggccattggacaccaaggtgaccactggaaggaagggcgtgtcttgctccacaagtctctgaaactttatcaggtgattttcgagggcgaaatcggaaaaggaaaccttggtgggattgctgtggatgacattagtattaataaccacatttcacaagaagattgtgcaaaaccagcagacctggataaaaagaacccagaaattaaaattgatgaaacagggagcacgccaggatacgaaggtgaaggagaaggtgacaagaacatctccaggaagccaggcaatgtgttgaagaccttagaccccatcctcatcaccatcatagccatgagtgccctgggggtcctcctgggggctgtctgtggggtcgtgctgtactgtgcctgttggcataatgggatgtcagaaagaaacttgtctgccctggagaactataactttgaacttgtggatggtgtgaagttgaaaaaagacaaactgaatacacagagtacttattcggaggcatgaaggcagacagagatgaaaagacagtcaaaggacggaagtggaaggacgggagtgagctggggagctgttgatctttcactatacaggctgggaagtgtgttgatgaccactgagccaggcttttctcaggagcttcaatgagtatggccgacagacatggacaaggagctgtgttcaccatcggactcatgtgcagtcagcttttttcctgttggtttcatttgaataatcagatgctggtgttgagaccaagtatgattgacataatcattcatttcgacccctcctgcccctctctctctctctcctctcccctttgtggattctttttggaaactgagcgaaatccaagatgctggcaccaagcgtattccgtgtggccctttggatggacatgctacctgaaacccagtgcccagaatatactagaatcaccgcatttcagtggactcctgaagttgtacttgtgtataattgcccgcgtcgtgcataggcaaagaaggattaggctgttttctttttaaagtactgtagcctcagtactggtgtagtgtgtcagctctgtttacgaagcaatactgtccagttttcttgctgtttttccggtgttgtactaaacctcgtgcttgtgaactccatacagaaaacggtgccatccctgaacacggctggccactgggtatactgctgacaaccgcaacaacaaaaacacaaatccttggcactggctagtctatgtcctctcaagtgcctttttgtttgtactggttcattgtgttacattaacgacccactctgcttcttgctggtgaaagccctgctctttaatcaaactctggtggcccactgactaagaagaaagtttattttcgtgtgagacgtcagcccctccgggcaggcaagggctctgaagatttggcaacgtggcttaattgttctgctttttctgtagttcaatttcatgtttcttgacccttttgtataaagctgcaatattctctcttattgttctttcatatggaatgtattttcaaatgtaaactctcttctctttctctctcctatctctctgtcttttttctctcttagaattggaggatttgccattgtccaggaaagaaacttgcagctttaacctgctgggaatggcaaacgattttactagactttatgtttaaaaataaataaataagggaaattcctaactttgccctccaaagtctaactttggttttcttgttaactggttaaagtgacagtatcttttttccttatctattctattcaaaatgacctttgatagaaatgttggcatttagtagaaatagtgataagttgaggaaagaaataatacaaattggctttcaagtgagacccaaaggaagaactggataaaatcttccaaatccaaaagcatgagatttttctatccaaatatgcaaaaatgacccaagagaactttcttattttgctactgagtcacacaagggaagtggaaggaagaacagttaatttaagaatgaaactataaatcctgatgcctgggggtcaagtattttaagataagagggggaaaaacacataaagtcaaaacaaatgttttaaaaattcataacagcaaccttgaaaaaatagacttaaatgaatgcttctagaaacttccagcggctcacaaagaataagcctgccttagggctggcaacatctaagcctctaacagcacagggaagcaaatatcttaccaggcagcctatgaattaacccaaagaagctttggttggttttggtggatttttatcatgccatgttggacatgagattttttagatcttccttcccacattgctagacgtctcactcaaagacatttgttgggagtcacatttgcatcatagacgagacagtccattcatcttagttaaattggattgagaatgccttttgtttccaggaaaatattgatcaccatgaaagaagaatagttttttgtccccagagacattcatttagttgatataatcctaccagaaggaaagcactaagaaacactcgtttgttgtttttaaaggcaacagacttaaagttgtcctcagccaaggaaaaatgatactgcaactttaaaatttaaagtatcttgcactgataaatatatttaaaaattatatgtttataaagttattaatttgtaaaggcagtgttacaaaatgttcagtttatattgttttagattgttttgtaatttttaaaggtgtaaaataacatattttttctttatggaaatctataaaactttctgtagtaaaatgttttcattttactggtatattattgcttcatgttttgtaccatcataagattttgtgcagattttttttacagaaattattattttctatgacaatatgacacttgtaaattgttgtttcaaaatgaacagcgaagccttaactttaaatgacatttgtattctcagacactgagtagcataaaaaccacatagaactgaactgtaacttaaattccaaactatgactactacattccaaagaaacagttgaattaaacattttcataaaataaaa

SEQ ID NO: 57 - DNA, 1708 bp, Homo sapiens
  misc_feature: Template ID: 290224.2
gacaacatacagaagccactgccaatgagctccgccgagtagcaccggggcagggctagcgcttaaaggagccgcgacccctttgcagaccagagggtgacccggatgatggcggccggcgcggccctagccctggccttgtggctactaatgccaccagtggaggtgggaggggcggggcccccgccaatccaggacggtgagttcacgttcctgttgccggcggggaggaagcagtgtttctaccagtccgcgccggccaacgcaagcctcgagaccgaataccaggtgatcggaggtgctggactggacgtggacttcacgctggagagccctcagggcgtgctgttggtcagcgagtcccgcaaggctgatggggtacacacggtggagccaacggaggccggggactacaagctgtgctttgacaactccttcagcaccatctccgagaagctggtgttctttgaactgatctttgacagcctccaggatgacgaggaggtcgaaggatgggcagaggctgtggagcccgaggagatgctggatgttaaaatggaggacatcaaggagtccattgagaccatgcggacccggctggagcgcagcatccagatgctcacgctactgcgggccttcgaggcacgtgaccgcaacctgcaagagggcaacttggagcgggtcaacttctggtcagctgtcaacgtggcggtgctgctgctggtggctgtgctgcaggtctgcacgctcaagcgcttcttccaggacaagcgcccggtgcccacgtagcccctgccatggaaggaagaacgggacaaaggaggggcagcagggtgtgtgcatatgagacttgggggtccctccccaattttagtttcctgccaaaacgggagtgtgcagtcagggcctgcggtctggccccatgagtctccttccgtcctcagcgggcagggaacacctctggcttgtagaagggacggctcagtggctgcaccgacggtcctggaaatctcacatggtgggcactgcagcgttggaacgtgagcctcggatttcctggcccctctactgtaaatgtgccttagcctaagcctcccatcctgtgttagcgttgcctggtgcggggcagggcctaacaaggaaacctgggccctccaagccaggttgaggtctggtaacagaatgccaggaagggggcctggaagaccacctgccccggcccctctcctgcaggggccccacacaggcatgagggatggcccggccaaagtctaggcagaagcctcctataacaaagggtggtgtggcctgggcattggagtcaataaattatggtcagaaaatcacaagagcctgctgattggggctcagggacaccagccaggacagaccggcccccgagggggcagccagacaggtgggaggggcctcccacgaagctcagaagaaaggtcgtgcgggagccgatggaggtggtcgcctggcacaagagaaaaatcagaaagcaaagtttaactgagccccagttgggccacgaggcttgggcttccccacgaggtgagagaagcagggcctgagggtaggaagggggtggagcgctggggtccccgcttcaccaggcagcagccaggcctgtgcacgtgggggtgtgcagggggtcagagaatatctgctcccactcctcacatgctaaggaaagtaaaagctc

SEQ ID NO: 58 - DNA, 4466 bp, Homo sapiens
  misc_feature: Template ID: 331428.2
  unsure 1874-2179, 4212, 4229, 4239, 4254, 4309, 4328, 4335, 4338: a, t, c, g, or other
gccgggaagtggaagagggagcgaaggaggcggggactgccaaggctccagcccggccgggctccgaggcgagaggctgcatggagtggccggcgcggctctgcgggctgtgggcgctgctgctctgcgccggcggcgggggcgggggcgggggcgccgcgcctacggaaactcagccacctgtgacaaatttgagtgtctctgttgaaaacctctgcacagtaatatggacatggaatccacccgagggagccagctcaaattgtagtctatggtattttagtcattttggcgacaaacaagataagaaaatagctccggaaactcgtcgttcaatagaagtacccctgaatgagaggatttgtctgcaagtggggtcccagtgtagcaccaatgagagtgagaagcctagcattttggttgaaaaatgcatctcacccccagaaggtgatcctgagtctgctgtgactgagcttcaatgcatttggcacaacctgagctacatgaagtgttcttggctccctggaaggaataccagtcccgacactaactatactctctactattggcacagaagcctggaaaaaattcatcaatgtgaaaacatctttagagaaggccaatactttggttgttcctttgatctgaccaaagtgaaggattccagttttgaacaacacagtgtccaaataatggtcaaggataatgcaggaaaaattaaaccatccttcaatatagtgcctttaacttcccgtgtgaaacctgatcctccacatattaaaaacctctccttccacaatgatgacctatatgtgcaatgggagaatccacagaattttattagcagatgcctattttatgaagtagaagtcaataacagccaaactgagacacataatgttttctacgtccaagaggctaaatgtgagaatccagaatttgagagaaatgtggagaatacatcttgtttcatggtccctggtgttcttcctgatactttgaacacagtcagaataagagtcaaaacaaataagttatgctatgaggatgacaaactctggagtaattggagccaagaaatgagtataggtaagaagcgcaattccacactctacataaccatgttactcattgttccagtcatcgtcgcaggtgcaatcatagtactcctgctttacctaaaaaggctcaagattattatattccctccaattcctgatcctggcaagatttttaaagaaatgtttggagaccagaatgatgatactctgcactggaagaagtacgacatctatgagaagcaaaccaaggaggaaaccgactctgtagtgctgatagaaaacctgaagaaagcctctcagtgatggagataatttatttttaccttcactgtgaccttgagaagattcttcccattctccatttgttatctgggaacttattaaatggaaactgaaactactgcaccatttaaaaacaggcagctcataagagccacaggtctttatgttgagtcgcgcaccgaaaaactaaaaataatgggcgctttggagaagagtgtggagtcattctcattgaattataaaagccagcaggcttcaaactaggggacaaagcaaaaagtgatgatagtggtggagttaatcttatcaagagttgtgacaacttcctgagggatctatacttgctttgtgttctttgtgtcaacatgaacaaattttatttgtaggggaactcatttggggtgcaaatgctaatgtcaaacttgagtcacaaagaacatgtagaaaacaaaatggataaaatctgatatgtattgtttgggatcctattgaaccatgtttgtggctattaaaactcttttaacagtctgnnnnnnnnnnnnnnnnnnnnnnnnnnnnnnnnnnnnnnnnnnnnnnnnnnnnnnnnnnnnnnnnnnnnnnnnnnnnnnnnnnnnnnnnnnnnnnnnnnnnnnnnnnnnnnnnnnnnnnnnnnnnnnnnnnnnnnnnnnnnnnnnnnnnnnnnnnnnnnnnnnnnnnnnnnnnnnnnnnnnnnnnnnnnnnnnnnnnnnnnnnnnnnnnnnnnnnnnnnnnnnnnnnnnnnnnnnnnnnnnnnnnnnnnnnnnnnnnnnnnnnnnnnnnnnnnnnnnnnnnnnnnnnnnnnnnnnnnnnnnnnnnnnacaaaaaaacctcttaatattctggagtcatcattcccttcgacagcattttcctctgctttgaaagccccagaaatcagtgttggccatgatgatgacaactacagaaaaaccagaggcagcttctttgccaagacctttcaaagccattttaggctgttaggggcagtggaggtagaatgactccttgggtattagagtttcaaccatgaagtctctaacaatgtattttcttcacctctgctactcaagtagcatttactgtgtctttggtttgtgctaggcccccgggtgtgaagcacagaccccttccaggggtttacagtctatttgagactcctcagttcttgccacttttttttttaatctccaccagtcatttttcagaccttttaactcctcaattccaacactgatttccccttttgcattctccctccttcccttccttgtagccttttgactttcattggaaattaggatgtaaatctgctcaggagacctggaggagcagaggataattagcatctcaggttaagtgtgagtaatctgagaaacaatgactaattcttgcatattttgtaacttccatgtgagggttttcagcattgatatttgtgcattttctaaacagagatgaggtggtatcttcacgtagaacattggtattcgcttgagaaaaaaagaatagttgaacctatttctctttctttacaagatgggtccaggattcctcttttctctgccataaatgattaattaaatagcttttgtgtcttacattggtagccagccagccaaggctctgtttatgcttttggggggcatatattgggttccattctcacctatccacacaacatatccgtatatatcccctctactcttacttcccccaaatttaaagaagtatgggaaatgagaggcatttcccccaccccatttctctcctcacacacagactcatattactggtaggaacttgagaactttatttccaagttgttcaaacatttaccaatcatattaatacaatgatgctatttgcaattcctgctcctaggggaggggagataagaaaccctcactctctacaggtttgggtacaagtggcaacctgcttccatggccgtgtagaagcatggtgccctggcttctctgaggaagctggggttcatgacaatggcagatgtaaagttattcttgaagtcagattgaggctgggagacagccgtagtagatgttctactttgttctgctgttctctagaaagaatatttggttttcctgtataggaatgagattaattcctttccaggtattttataattctgggaagcaaaacccatgcctccccctagccatttttactgttatcctatttagatggccatgaagaggatgctgtgaaattcccaacaaacattgatgctgacagtcatgcagtctgggagtggggaagtgatcttttgttcccatcctcttcttttagcagtaaaatagctgagggaaaagggagggaaaaggaagttatgggaatacctgtggtggttgtgatccctaggtcttgggagctcttggaggtgtctgtatcagtggatttcccatcccctgtgggaaattagtaggctcatttactgttttaggtctagcctatgtggattttttcctaacatacctaagcaaacccagtgtcaggatggtaattcttattctttcgttcagttaagtttttcccttcatctgggcactgaagggatatgtgaaacaatgttaacatttttggtagtcttcaaccagggattgtttctgtttaacttcttataggaaagcttgagtaaaataaatattgtctttttgtatgtcacccaaatgttttcctttggtcttattttggggaaatggtgggaggtagagaaaattggagttaaaagtagaaacattatgaaaaaattccaagccagctattttatcttataatcattcatcatgagtttctttgatgttctggctgttccggtgtgcctatgttntctgataaggcattaanacacttagtntaatattaatttagncctttgtaagcagcacttgaagggacttaagtattcaataaattgtagttatganaattaatggaaatggaggnttggtcnttnctaatattaagctaaagtggaatgcaatatgattaatgatatacatgatgtgcaatgtctagtcacaagggaatatattagcaggttagattagagaccaagaaagtcagtttttgactggacgcagt

SEQ ID NO: 59 - DNA, 5286 bp, Homo sapiens
  misc_feature: Template ID: 401593.10
  unsure 3830, 3926, 4866, 4870, 4872, 4876, 4881, 4883, 4887, 4891, 4895, 4899,5196, 5233: a, t, c, g, or other
gtggctgctcgcggttcccggcgctaacgcggccccgcggtcggcgctctattcgccttccgacccgctgacgctgctgcaggcggacacggtgcgcggcgcggtgctgggctcccgcagcgcctgggccgtggagttcttcgcctcctggtgcggccactgcatcgccttcgccccgacgtggaaggcgctggccgaagacgtcaaagcctggaggccggccctgtatctcgccgccctggactgtgctgaggagaccaacagtgcagtctgcagagacttcaacatccctggcttcccgactgtgaggttcttcaaggcctttaccaagaacggctcgggagcagtatttccagtggctggtgctgacgtgcagacgctgcgggagaggctcattgacgccctggagtcccatcatgacacgtggcccccagcctgtcccccactggagcctgccaagctggaggagattgatggattctttgcgagaaataacgaagagtacctggctctgatctttgaaaagggaggctcctacctgggtagagaggtggctctggacctgtcccagcacaaaggcgtggcggtgcgcagggtgctgaacacagaggccaatgtggtgagaaagtttggtgtcaccgacttcccctcttgctacctgctgttccggaatggctctgtctcccgagtccccgtgctcatggaatccaggtccttctataccgcttacctgcagagactctctgggctcaccagggaggctggcccagaccacagttgcaccaaccactgctaacaagatagctcccactgtttggaaattggcagatcgctccaagatctacatggctgacctggaatctgcactgcactacatcctgcggatagaagtgggcaggttcccggtcctggaagggcagcgcctggtggccctgaaaaagtttgtggcagtgctggccaagtatttccctggccggcccttagtccagaacttcctgcactccgtgaatgaatggctcaagaggcagaagagaaataaaattccctacagtttctttaaaactgccctggacgacaggaaagagggtgccgttcttgccaagaaggtgaactggattggctgccaggggagtgagccgcatttccggggctttccctgctccctgtgggtcctcttccacttcttgactgtgcaggcagctcggcaaaatgtagaccactcacaggaagcagccaaggccaaggaggtcctcccagccatccgaggctacgtgcactacttcttcggctgccgagactgcgctagccacttcgagcagatggctgctgcctccatgcaccgggtggggagtcccaacgccgctgtcctctggctctggtctagccacaacagggtcaatgctcgccttgcaggtgcccccagcgaggacccccagttccccaaggtgcagtggccaccccgtgaactttgttctgcctgccacaatgaacgcctggatgtgcccgtgtgggacgtggaagccaccctcaacttcctcaaggcccacttctccccaagcaacatcatcctggacttccctgcagctgggtcagctgcccggagggatgtgcagaatgtggcagccgccccagagctggcgatgggagccctggagctggaaagccggaattcaactctggaccctgggaagcctgagatgatgaagtcccccacaaacaccaccccacatgtgccggctgagggacctgaggcaagtcgacccccgaaggctgcaccctggcctcagagctgcaccaggccaggagcctcctgagcacatggcagagcttcagaggaatgagcaggagcagccgcttgggcagtggcacttgagcaagcgagacacaggggctgcattgctggctgagtccagggctgagaagaaccgcctctggggccctttggaggtcaggcgcgtgggccgcagctccaagcagctggtcgacatccctgagggccagctggaggcccgagctggacggggccgaggccagtggctgcagcttatttgaagtcctgcctcattctcactggagcctcagtctctcctgcttggtcttggccctcaactggggcaagtgaagccagaggagggtcccccagctgggtgggctggaatggaactcctcactagctgctggggctccgcccaccctgctcccttccggacaatgaagaagcctttgcaccctgggaggaaggaccaccccgggccctctatgcctggccagcctccagctcctcagacctcctgggtggggtttggcttcagggtggggtttggaagcttctggaagtcgtgctggtctcccaggtgaggcaagccatggttgctgggctgtagggtgagtggcttgcttggtgggacctgacgagttggtggcatgggaaggatgtgggtctctagtgccttgccctggcttagctgcaggagaagatggctgctttcacttccccccattgagctctgctccctctgagcctggtcttttgtccttttttattttggtctccaagatgaatgctcatctttggagggtgccaggtagaagctagggaggggagtgtcttctctctccaggtttcaccttccagtgtgcagaagttagaagggtctggcgggggcagtgccttacacatgcttgattcccacgctaccccctgccttgggaggtgtgtggaataaattatttttgttaaggcaagcattggtgtgttctttaacttgctacttggagacctagtgtccagtctggacagaatgcacagagaccagcctcacctggaatgcagccagactcgatgtccctcagcacacacagctcctggccacagactgcccatagaactgtctgcacccaaaccccatggccttttcatgcacggagacaggcctctggatgtgcagccttgccaccccctgccccaatcctccctgagagctcctgcctcagtgccctgggctggtgagggaggagcctgtctgcacctgcctaattccagctcctccaggaagcaagggcttgtttgtcagagctgcagggttggccactcggtggggaggagtcagccaggattagagagcctgcccctaatccggcctgctgggttttacaaggatcagagctgctgataatgaacctcattaagggggagcaggagcctcaatccgatttggttttctctttgacatcttcactctgctcagatggcctgggtgctatgtggagcaggtgggatgccaaggccactcctgctatggggcagctggggctggggagggatggcagtctccctgcatgtttccctcgacctctttagctgcagcgccttgctgggctcctgggttggactccctctctgtgcccctgctccaggcacccattggctccatcctcctggttgtgctctgcaccccctgctcccttgggctggccctggctgggggcctgagagacagacaggaacccacaatcaggaggcaaccctggcctgcaagaggaagacagaggctcccagggccggtgccctgtgtgcccactgcaccaaggccgctgaataagcctgcccttcaccccctaagggctccttgcccaatgccaagtgctggggatttctgtcagcaagccctgtggctccagtgacggtatttctaaagccaaacttagttacctagaattagcgccatgttggaaacactgtcgcagcagcccgggctgcacagtgtgtagcccagcctccaggtccacggagtgttgtggacctcccacctcacagctgcctctggcanccaagcctcttttcgcccggccccagcccctctggttgataaacgggtgggcctcctcagcagcgtggctgcctttcaccttgatttccccagggnttctcggcaacatcgataaaccagcctcgcccaccagctgggccctcccccacccagtctgccaggctgggagctggagcttgctgagtcttgaatgcccttctagatggcttctctagaggctctcctggcaagagagggtcccaaggggagccctgcaaagcaaaggctccttgtctggggcgggatagagaatctcgcctctgtctggtgtgttacctactgggggcacaggaacaatttcctcaaggagacagtggcatggagctttgaaagacgagtaggtgttagcaaggaaataaggaggaacgggggttacgggcagaggagaaagcacatgccaagtcagcaaagaaaagtagaattcgaaaactttttaaaaatattactaaggattttcacaatgctgcactgggctagaaactgaagctaaaacagatacgtggtccctgctgctatggggcttccgttctagaggcaaggacaggttgtgatgagggttctgaaggatagagaccaagcagggagggtgttgaggaggcttctgcgagacctgaaggatgggaagccaggaagtgggaggggtgggggtccaggctggaggggcccaatgtaggtgtagagggactacagccctgaggggctgctccatgcggcattcttggaggtccaagaggggcagcgccaccttgggccaggctcctctccagcagccttggtatggggtgggggtgggaagacccctgatgcagcctgtcctctgggtgtgggggtggaggagagggctccaggggacccagccagccttgaccctggaggaaagtcaggtgggctcagagagagccctcaaatctgggccctgggtcagggtggggtcaagtccagccttgaagagaatggactctggaatctgacgtctgggtttgaatccagcttccancacncnctgnctgtntnactntggncaanatancttatcctcttgtccccatgtgtcattggagataaactacccacctaccagattgttgtaccatgctgggcaaacactaagtacttaataatggtagcccactgctcatgtcgtgtcgtctcctgtcttgatacctgaaaactcaaggggccctgttgtgcttggaggggggtgccgttcccacaggatattctgtgaagggtgtccctggagctgggcctccaggtggcaagccccaagccaccccggcaggtgccactggccagagttgaactgaggtgttgagtggaaagtgcntccccacccccatctgccacagtagtatggatttccntcatgagatgggggctcctaaaatgcctgaaatgtgtatgctgttggagaatt

SEQ ID NO: 60 - DNA, 1873 bp, Homo sapiens
  misc_feature: Template ID: 199772.6
cccacgcgtccggcggagccagcgagaggtctgcgcggagtctgagcggcgctcgtcccgtcccaaggccgacgccagcacgccgtgcatggcccccgcagcggcgacggggggcagcaccctgcccagtggcttctcggtcttcaccaccttgcccgacttgctcttcatctttgagtttatcttcgggggcctggtgtggatcctggtggcctcctccctggtgccctggcccctggtccagggctgggtgatgttcgtgtctgtgttctgcttcgtggccaccaccaccttgatcatcctgtacataattggagcccacggtggagagacttcctgggtcaccttggacgcagcctaccactgcaccgctgccctcttttacctcagcgcctcagtcctggaggccctggccaccatcacgatgcaagacggcttcacctacaggcactaccatgaaaacattgctgccgtggtgttctcctacatagccactctgctctacgtggtccatgcggtgttctctttaatcagatggaagtcttcataaagccgcagtagaacttgagctgaaaacccagatggtgttaactggccgccccactttccggcataactttttagaaaacagaaatgcccttgatggtggaaaaaagaaaacaaccacccccccactgcccaaaaaaaaaagccctgccctgttgctcgtgggtgctgtgtttactctcccgtgtgccttcgcgtccgggttgggagcttgctgtgtctaacctccaactgctgtgctgtctgctagggtcacctcctgtttgtgaaaggggaccttcttgttcgggggtgggaagtggcgaccgtgacctgagaaggaaagaaagatcctctgctgacccctggagcagctctcgagaactacctgttggtattgtccacaagctctcccgagcgccccatcttgtgccatgttttaagtcttcatggatgttctgcatgtcatggggactaaaactcacccaacagatctttccagaggtccatggtggaagacgataaccctgtgaaatactttataaaatgtcttaatgttcaatacatttgttgggtgttttttgggtttgggttgaattcctcagcatcaagaataccatcaattcagctttctttctgaggaatcctttgacttaacctgaatctcaagagacagcatcaggtggcagttcagacgacggacactgtgtgtgccaggccactgcactctcagagcccggtgctggggagcccaccctcccagctacctgcccagatggcttcccctctctctggaaactggccaagtgccagccaggggcagcttctccttcctacaagacacaacagtctgtgccccactagaacctccttccaccaaaagaaaacacggtgcacaagttttcattcactcattgtgaagctcatcagcgtgttcctgggcagtctgctttgttcccattgtgtggataatacattattttagaatttcctcgggccactccataggagagaaaggagaggaaattacagagtgaaaggaagtacggtgacaaggggtgaatgccatgtttcaagtctgagatgtctgggttgaaaggagatgggatgattaggaaggaggcactgagttaggaatctggaaagcccagctctgttatgaaacgctcccttatcccatggctccgagaagttagtgccattccagagatgggacgctggaagaggtgcttgaagacccgtgagcttcctgccatggaggtgtgtggtagagcatctgcaacctcttgctggcagccatggggacaaagattcaagcttcaggctgtaacggtgtcatgtacctgtg

SEQ ID NO: 61 - DNA, 5831 bp, Homo sapiens
  misc_feature: Template ID: 330836.1
actggaacaagtgaacactgggtcgatgatgaagggccccagccaaagaaagtaaaggctgaagatgaggccttactctcagaagaagatgaccccattgatcgacggccatggacacagcagcaccttgaagctgcagacatccgtaggacaccatcgctggctctcacccctcctcaggcagagcaggaggtggatgtgttagatgtgaatgtccgtggcccagatggctgcaccccattgatgttggcttctctccgaggaggcagctcagatttgagtgatgaagatgaagatgcagaggactcttctgctaacatcatcacagacttggtctaccagggtgccagcctccaggcccagacagaccggactggtgagatggccctgcaccttgcagcccgctactcacgggctgatgctgccaagcgtctcctggatgcaggtgcagatgccaatgcccaggacaacatgggccgctgtccactccatgctgcagtggcagctgatgcccaaggtgtcttccagattctgattcgcaaccgagtaactgatctagatgccaggatgaatgatggtactacacccctgatcctggctgcccgcctggctgtggagggaatggtggcagaactgatcaactgccaagcggatgtgaatgcagtggatgaccatggaaaatctgctcttcactgggcagctgctgtcaataatgtggaggcaactcttttgttgttgaaaaatggggccaaccgagacatgcaggacaacaaggaagagacacctctgtttcttgctgcccgggaggggagctatgaagcagccaagatcctgttagaccattttgccaatcgagacatcacagaccatatggatcgtcttccccgggatgtggctcgggatcgcatgcaccatgacattgtgcgccttctggatgaatacaatgtgaccccaagccctccaggcaccgtgttgacttctgctctctcacctgtcatctgtgggcccaacagatctttcctcagcctgaagcacaccccaatgggcaagaagtctagacggcccagtgccaagagtaccatgcctactagcctccctaaccttgccaaggaggcaaaggatgccaagggtagtaggaggaagaagtctctgagtgagaaggtccaactgtctgagagttcagtaactttatcccctgttgattccctagaatctcctcacacgtatgtttccgacaccacatcctctccaatgattacatcccctgggatcttacaggcctcacccaaccctatgttggccactgccgcccctcctgccccagtccatgcccagcatgcactatctttttctaaccttcatgaaatgcagcctttggcacatggggccagcactgtgcttccctcagtgagccagttgctatcccaccaccacattgtgtctccaggcagtggcagtgctggaagcttgagtaggctccatccagtcccagtcccagcagattggatgaaccgcatggaggtgaatgagacccagtacaatgagatgtttggtatggtcctggctccagctgagggcacccatcctggcatagctccccagagcaggccacctgaagggaagcacataaccacccctcgggagcccttgccccccattgtgactttccagctcatccctaaaggcagtattgcccaaccagcgggggctccccagcctcagtccacctgccctccagctgttgcgggccccctgcccaccatgtaccagattccagaaatggcccgtttgcccagtgtggctttccccactgccatgatgccccagcaggacgggcaggtagctcagaccattctcccagcctatcatcctttcccagcctctgtgggcaagtaccccacacccccttcacagcacagttatgcttcctcaaatgctgctgagcgaacacccagtcacagtggtcacctccagggtgagcatccctacctgacaccatccccagagtctcctgaccagtggtcaagttcatcaccccactctgcttctgactggtcagatgtgaccaccagccctacccctgggggtgctggaggaggtcagcggggacctgggacacacatgtctgagccaccacacaacaacatgcaggtttatgcgtgagagagtccacctccagtgtagagacataactgacttttgtaaatgctgctgaggaacaaatgaaggtcatccgggagagaaatgaagaaatctctggagccagcttctagaggtaggaaagagaagatgttcttattcagataatgcaagagaagcaattcgtcagtttcactgggtatctgcaaggcttattgattattctaatctaataagacaagtttgtggaaatgcaagatgaatacaagccttgggtccatgtttactctcttctatttggagaataagatggatgcttattgaagcccagacattcttgcagcttggactgcattttaagccctgcaggcttctgccatatccatgagaagattctacactagcgtcctgttgggaattatgccctggaattctgcctgaattgacctacgcatctcctcctccttggacattcttttgtcttcatttggtgcttttggttttgcacctctccgtgattgtagccctaccagcatgttatagggcaagacctttgtgcttttgatcattctggcccatgaaagcaactttggtctcctttcccctcctgtcttcccggtatcccttggagtctcacaaggtttactttggtatggttctcagcacaaacctttcaagtatgttgtttctttggaaaatggacatactgtattgtgttctcctgcatatatcattcctggagagagaaggggagaagaatacttttcttcaacaaattttgggggcaggagatcccttcaagaggctgcaccttaatttttcttgtctgtgtgcaggtcttcatataaactttaccaggaagaagggtgtgagtttgttgtttttctgtgtatgggcctggtcagtgtaaagttttatccttgatagtctagttactatgaccctccccacttttttaaaaccagaaaaaggtttggaatgttggaatgaccaagagacaagttaactcgtgcaagagccagttacccacccacaggtccccctacttcctgccaagcattccattgactgcctgtatggaacacatttgtcccagatctgagcattctaggcctgtttcactcactcacccagcatatgaaactagtcttaactgttgagcctttcctttcatatccacagaagacactgtctcaaatgttgtacccttgccatttaggactgaactttccttagcccaagggacccagtgacagttgtcttccgtttgtcagatgatcagtctctactgattatcttgctgcttaaaggcctgctcaccaatctttctttcacaccgtgtggtccgtgttactggtatacccagtatgttctcactgaagacatggactttatatgttcaagtgcaggaattggaaagttggacttgttttctatgatccaaaacagccctataagaaggttggaaaaggaggaactatatagcagcctttgctattttctgctaccatttcttttcctctgaagcggccatgacattccctttggcaactaacgtagaaactcaacagaacattttcctttcctagagtcaccttttagatgataatggacaactatagacttgctcattgttcagactgattgcccctcacctgaatccactctctgtattcatgctcttggcaatttctttgactttcttttaagggcagaagcattttagttaattgtagataaagaatagttttcttcctcttctccttgggccagttaataattggtccatggctacactgcaacttccgtccagtgctgtgatgcccatgacacctgcaaaataagttctgcctgggcattttgtagatattaacaggtgaattcccgactcttttggtttgaatgacagttctcattccttctatggctgcaagtatgcatcagtgcttcccacttacctgatttgtctgtcggtggccccatatggaaaccctgcgtgtctgttggcataatagtttacaaatggttttttcagtcctatccaaatttattgaaccaacaaaaataattacttctgccctgagataagcagattaagtttgttcattctctgctttattctctccatgtggcaacattctgtcagcctctttcatagtgtgcaaacattttatcattctaaatggtgactctctgcccttggacccatttattattcacagatggggagaacctatctgcatggacctctgtggaccacagcgtacctgcccctttctgccctcctgctccagccccacttctgaaagtatcagctactgatccagccactggatattttatatcctcccttttccttaagcacagtgtcagaccaaattgcttgtttctttttcttggactactttaatttggatcctttgggtttggagaaagggaatgtgaaagctgtcattacagacaacaggtttcagtgatgaggaggacaacactgcctttcaaactttttactgatctcttagattttaagaactcttgaattgtgtggtatctaataaaagggaaggtaagatggataatcactttctcatttgggttctgaattggagactcagtttttatgagacacatcttttatgccatgtatagatcctcccctgctatttttggtttatttttattgttataaatgctttctttctttgactcctcttctgcctgcctttggggataggtttttttgtttgtttatttgcttcctctgttttgttttaagcatcattttcttatgtgaggtggggaagggaaaggtatgagggaaagagagtctgagaattaaaatattttagtataagcaattggctgtgatgctcaaatccattgcatcctcttattgaatttgccaatttgtaatttttgcataataaagaaccaaaggtgtaatgttttgttgagaggtggtttagggattttggccctaaccaatacattgaatgtatgatgactatttgggaggacacatttatgtacccagaggcccccactaataagtggtactatggttacttccttgtgtacatttctcttaaaagtgatattatatctgtttgtatgagaaacccagtaaccaataaaatgaccgcatattcctgactaaacgtagtaaggaaaatgcacactttgtttttacttttccgtttcattctaaaggtagttaagatgaaatttatatgaaagcatttttatcacaaaataaaaaaggtttgccaagctcagtggtgttgtattttttattttccaatactgcatccatggcctggcagtgttacctcatgatgtcataatttgctgagagagcaaattttcttttctttctgaatcccacaaagcctagcaccaaacttctttttttcttcctttaattagatcataaataaatgatcctggggaaaaagcatctgtcaaataggaaacatcacaaaactgagcactcttctgtgcactagccatagctggtgacaaacagatggttgctcagggacaaggtgccttccaatggaaatgcgaagtagttgctatagcaagaattgggaactgggatataagtcataatattaattatgctgttatgtaaatgattggtttgtaacattccttaagtgaaatttgtgtagaacttaatatacaggatt

SEQ ID NO: 62 - DNA, 2389 bp, Homo sapiens
  misc_feature: Template ID: 902142.11
attgccacatgcagctcagcctgggctacacagccaggtgtcagatgtgtctctgctgatctgagtctgcctgtggcatggacctgcatcttccctgaagcatctccagggctgaaaaatcactgaccatggcaccatggtctcatccatctgcacagctgcagccagtgggaggagacgccgtgagccctgccctcatggttctgctctgcctcgggctgagtctgggccccaggacccacgtgcaggcaggtgagtctgtccccagctgtcccaggtccctcctcctcaatggggacaaagggccacccatgggcagctggaggtgaagaccgcagttctgggtgattgatggggacgtctggagggtcctcgggctgagagctgggatctgaggggtggggaggtcttggagcccagactctgatttccttccagggaactccccaaacccaccctctgggctgagccaggctctgtgatcagctgggggaactctgtgaccatctggtgtcaggggaccctggaggctcgggagtaccgtctggataaagaggaaagcccagcaccctgggacagacagaacccactggagcccaagaacaaggccagattctccatcccatccatgacagaggactatgcagggagataccgctgttactatcgcagccctgtaggctggtcacagcccagtgaccccctggagctggtgatgacaggagcctacagtaaacccaccctttcagccctgccgagtcctcttgtgacctcaggaaagagcgtgaccctgctgtgtcagtcacggagcccaatggacactttccttctgatcaaggagcgggcagcccatcccctactgcatctgagatcagagcacggagctcagcagcaccagggctgaattccccatgagtcctgtgacctcagtgcacggggggacctacaggtgcttcagctcacacggcttctcccactacctgctgtcacaccccagtgaccccctggagctcatagtctcaggatccttggagggtcccaggccctcacccacaaggtccgtctcaacagctgcaggccctgaggaccagcccctcatgcctacagggtcagtcccccacagtggtctgagaaggcactgggaggtactgatcggggtcttggtggtctccatcctgcttctctccctcctcctcttccctcctcctccaacactggcgtcagggaaaacacaggacattggcccagagacaggctgatttccaacgtcctccaggggctgccgagccagagcccaaggacgggggcctacagaggaggtccagcccagctgctgacgtccagggagaaaacttctgtgctgccgtgaagaacacacagcctgaggacggggtggaaatggacactcggagcccacacgatgaagacccccaggcagtgacgtatgccaaggtgaaacactccagacctaggagagaaatggcctctcctccctccccactgtctggggaattcctggacacaaaggacagacaggcagaagaggacagacagatggacactgaggctgctgcatctgaagccccccaggatgtgacctacgcccagctgcacagctttaccctcagacagaaggcaactgagcctcctccatcccaggaaggggcctctccagctgagcccagtgtctatgccactctggccatccactaatccaggggggacccagaccccacaagccatggagactcaggaccccagaaggcatggaagctgcctccagtagacatcactgaaccccagccagcccagacccctgacacagaccactagaagattccgggaacgttgggagtcacctgattctgcaaagataaataatatccctgcattatcaaaataaagtagcagacctctcaattcacaatgagttaactgataaaacaaaacagaagtcagacaatgttttaaattgaatgatcatgtaaatattacacatcaaaccaatgacatgggaaaatgggagcttctaatgaggacaaacaaaaaatagagaaaaattaataaagtcaaaatgtttattcttgaaaacattaatgatacatgaatcttgggggcaccatggagggaaaattccatactgggataaagggaaacctattcaatacaagggccggggggttacccgaaatccgggaattccgcaaaagcgcggggacaataaggtgtgtttcccccgggtggggaaaaaattgtttattacggccctcacgaattttttcccgacatatgaatttccgggagccggggtaagccctcataaagtgtgttaaaaaccctcttgggggggggcccctaaattgtaaaataaggcccccgaaccctccac

SEQ ID NO: 63 - DNA, 4500 bp, Homo sapiens
  misc_feature: Template ID: 995211.5
ccccacatgatttattcagtagtttttatgttcccaaattacaatttatgtctattcataagactacaaaagttaccattagaattgtctgtgcttataaaataccaactttttttttaaactgttacatatactcattaacaccagtctgcaacaagttacatagaatcagaggcacttcaaaggcttaaaaagacgtttacaacttaaatgcatttttaagaacaaaaactgatttttctttaaacctctactcgtaccttcaaattgcaagaaattaacaaatacagtggccaaaggaatctgcagcaacttcttaaaatactgttaacatctttgggtttgctgaggcttgtcagtaacttacatcaaatcctcccaaaagaagatctgattagatagatatgactaaacggttttgtagtaataatccaattttacacattaatttgctgttgcaaatctgcccaaagctacaggtaatgaaaaataaagcaagtgtaaaatggatagtctgacacttaaaaatttatacaaagtggaagttaaagtttacatatttgaaaatcacatatacactaaattaccattatctgaattttccaaagacaaattgcaccatgacagctacaaaaggcatagggtttggttttaagggcacaagaagggagggcagaggagaggaaggggacaacagataaattaacaaagtaagaccaacttggtaaggtcaatctgagacatgctgacacaaatgaaacagctttcatctttgagtcataggaaaaagacaatcattttgtatttgcgcataaaagtttaaaccaattccatgaacatcgagggttttcataacataatattttgccactgctattcacagaacactgcagatgttaaattttaattttatgttgttctaaagaaatacatgaaatgttttaaatacaatgggattttatcattaaagtgccagaatggctctttaatgaaaacaaaaaacaaagatcttcattattctatgcaaaagctttattttgaaaagttcagtgatctcataaatagagacactaagttggagttttacgcataaaactccttagtaggtgccttctgcataagcagcactggatggtttgcgttctccaaggtcatagcttccttcatccttctttctcatgcgatacaccaacagcaggataagaaaaattgcaaagagaaagccaataactccaccagcaatgacagctgctaggacttctgtccgtttaaacagactgtctgagtgtttctcagtatacacatttgtatcctcttcggctgggtccattttcctttctgagtcagagaggtgaactttctctttatcagtttcttcaggtgactttgtctgagcaggtatcttgttctgtatattcagcgtcgtggtttccacttttggagcagcactagtcaacagtatctttggaagtggtcgagttgttgtcagctctggactctctacatcctcatcagctcccgagccagacgcagaagcgtagtcatcgtcatcaataggatacactcctgaagcttcttcaatggagctgttgtcaaggtacatgtctttatcagatgtcagctctgctctcgactccgccgctgcttgcaaccagggcaaaacgaagcctcctgcccagcgctcggcgcaccccgcgcacacgaatccggagcagagctgacatctgataaagacatgtaccttgacaacagctccattgaagaagcttcaggagtgtatcctattgatgacgatgactatgcttctgcgtctggctcgggagctgatgaggatgtagagagtccagagctgacaacatctcgaccacttccaaagatactgttgactagtgctgctccaaaagtggaaaccacgacgctgaatatacagaacaagatacctgctcagacaaagtcacctgaagaaactgataaagagaaagttcacctctctgactcagaaaggaaaatggacccagccgaagaggatacaaatgtgtatactgagaaacactcagacagtctgtttaaacggacagaagtcctagcagctgtcattgctggtggagttattggctttctctttgcaatttttcttatcctgctgttggtgtatcgcatgagaaagaaggatgaaggaagctatgaccttggagaacgcaaaccatccagtgctgcttatcagaaggcacctactaaggagttttatgcgtaaaactccaacttagtgtctctatttatgagatcactgaacttttcaaaataaagcttttgcatagaataatgaagatctttgttttttgttttcattaaagagccattctggcactttaatgataaaatcccattgtatttaaaacatttcatgtatttctttagaacaacataaaattaaaatttaacatctgcagtgttctgtgaatagcagtggcaaaatattatgttatgaaaaccctcgatgttcatggaattggtttaaacttttatgcgcaaatacaaaatgattgtctttttcctatgactcaaagatgaaagctgtttcatttgtgtcagcatgtctcagattgaccttaccaagttggtcttactttgttaatttatctgttgtccccttcctctcctctgccctcccttcttgtgcccttaaaaccaaaccctatgccttttgtagctgtcatggtgcaatttgtctttggaaaattcagataatggtaatttagtgtatatgtgattttcaaatatgtaaactttaacttccactttgtataaatttttaagtgtcagactatccattttacacttgctttatttttcattacctgtagctttgggcagatttgcaacagcaaattaatgtgtaaaattggattattactacaaaaccgtttagtcatatctatctaatcagatcttcttttgggaggatttgatgtaagttactgacaagcctcagcaaacccaaagatgttaacagtattttaagaagttgctgcagattcctttggccactgtatttgttaatttcttgcaatttgaaggtacgagtagaggtttaaagaaaaatcagtttttgttcttaaaaatgcatttaagttgtaaacgtctttttaagcctttgaagtgcctctgattctatgtaacttgttgcagactggtgttaatgagtatatgtaacagtttaaaaaaaaagttggtattttataagcacagacaattctaatggtaacttttgtagtcttatgaatagacataaattgtaatttgggaacataaaaactactgaataaatcatgtggcctaatattgaaaatgtcactgttataaattttgtacatttttgatcaaatgtacatctcccctttgctaacggccgtctgctctcaaggatgacgtgggtttgatttctaagtgtttcacagtgtctgtaaatcaagaccaaagagcctgtcgatgagactgtttattaccagattcacttctgaattggccagaggaaatctgaatgtattatcctgtgtgtgtctaggtagagatattggaaggctgccaggggatttcgaagtttgcaacctttataggataactgatggcaatattaagacagacgcctgcttttgcaaataacttacaagactgtaaattccaaagatctgaatggggctttcctgatgttggtatctaaggcttaggcctatagattgatttacctttggaattgtgctccaaatgtctactgaagcttaaccgaagaactaataaatggactacagtagctcacgttacagggaaggagggtaggcagggaggctctgtgtgttaaaatgagggtctcactgctttaggattgaagtggctggaaagagtgatgcctggggaaggagatggagttatgagggtactgtggctggtactttctgtactaaacatttcctttttctattttaccactaattttgttttaaactgtgagccgtccaagtcagaagaagacagcaaaaaaaagcaacttttccaacatacaatttacttttaataaagtatgaatatttcattttgagaacattccctggaattgccacataattcattaaaaacatttttttaagcaacacttggaacagtgtttactttaaatccttaatggccttaattaattctcagattcctgccccatcacttacagaaccaattcactttagagtgactaaaaggaaacgatagcctagctttctaaagccacgctgtgtccctcaattacagagggtaggaatgggtatacctctaactgtgcaaagcagagtgaaattcaattcatagaataacaactgctgggaatatccgtgccaggaaaagaaaaatttctggcaaatattttgtcactgctgtaaagcaaaatatttgtgaaagtgccaaaataaagtctgtcatgccaaaagtaaaagaaaaaaaaaagggcggccg

SEQ ID NO: 64 - DNA, 1057 bp, Homo sapiens
  misc_feature: Template ID: 235310.12
cccaacctcccaaagcctgtgggtttcccccagagcccaagcccccaagttttgtcgtccgctacaagcaggggagaagagacatctaagtgtgttgccacaggacaagttgtgcagaagtaacgcacatagtccggtggcccagacgccagccccctgagtcccgccagacacgctctcccccttgctaacctcttggctgtcaggatccaccttccctggcttctaaacttgcctcccccacccccgtcataactctgtgcctcagtttaccttctttttcctcctcaggtctccgtcctgtccaggcccaggcccagagcggtaggcctagacccagcagtccctctctctacctcccagagacctccctgtctccgtctctcccacaccctttccaaacctccctgccgctgacccccctccccacagttcccagcacacactgacctcccctgacccctgtgctgcagattgcagttgctctacggtgagcccgggcgtgctggcagggatcgtgatgggagacctggtgctgacagtgctcattgccctggccgtgtacttcctgggccggctggtccctcgggggcgaggggctgcggagggtgagtggggctagcaggggacatcctgaggacttgcctagatgggggtggggggctgggtaaactcccagatctcaaacatccaaagggatggtaatggaggtgctgatttggaatgacaaaacaccctcaactcaccactctgcctgtctctgcaccccacaacacccctcacctccagcagcgacccggaaacagcgtatcactgagaccgagtcgccttatcaggagctccagggtcagaggtcggatgtctacagcgacctcaacacacagaggccgtattacaaatgagcccgaatcatgacagtcagcaacatgatacctggatccagccattcctgaagcccaccctgcacctcattccaactcctaccgcgatacagacccacagagtgccatccctgagagaccagaccgctccccaatactctcctaaaataaacatg

SEQ ID NO: 65 - DNA, 6046 bp, Homo sapiens
  misc_feature: Template ID: 900031.4
gagcgcgcgcaaaccgcagcgcggctggaggcagtcggagtgggtgggcgcgccgcaagcccgcttgcagggtccccattggccgcctgccggccgccctccgcccaaaaggcggcaaggagccgagaggctgcttcggagtgtgaggaggacagccggaccgagccaacgccggggactttgttccctccgcggaggggactcggcaactcgcagcggcagggtctggggccggcgcctgggagggatctgcgccccccactcactccctagctgtgttcccgccgccgccccggctagtctccggcgctggcgcctatggtcggcctccgacagcgctccggagggaccgggggagctcccaggcgcccgggactggagactgatgcatgagggggctacggaggcgcaggagcggtggtgatggtctgggaagcggagctgaagtgccctgggctttggtgaggcgtgacagtttatcatgaccgtgttcaggcaggaaaacgtggatgattactacgacaccggcgaggaacttggcagtggacagtttgcggttgtgaagaaatgccgtgagaaaagcaccggcctccagtatgccgccaaattcatcaagaaaaggaggactaagtccagccggcggggtgtgagccgcgaggacatcgagcgggaggtcagcatcctgaaggagatccagcaccccaatgtcatcaccctgcacgaggtctatgagaacaagacggacgtcatcctgatcttggaactcgttgcaggtggcgagctgtttgacttcttagctgaaaaggaatctttaactgaagaggaagcaactgaatttctcaaacaaattcttaatggtgtttactacctgcactcccttcaaatcgcccactttgatcttaagcctgagaacataatgcttttggatagaaatgtccccaaacctcggatcaagatcattgactttgggttggcccataaaattgactttggaaatgaatttaaaaacatatttgggactccagagtttgtcgctcctgagatagtcaactatgaacctcttggtcttgaggcagatatgtggagtatcggggtaataacctatatcctcctaagtggggcctccccatttcttggagacactaagcaagaaacgttagcaaatgtatccgctgtcaactacgaatttgaggatgaatacttcagtaataccagtgccctagccaaagatttcataagaagacttctggtcaaggatccaaagaagagaatgacaattcaagatagtttgcagcatccctggatcaagcctaaagatacacaacaggcacttagtagaaaagcatcagcagtaaacatggagaaattcaagaagtttgcagcccggaaaaaatggaaacaatccgttcgcttgatatcactgtgccaaagattatccaggtcattcctgtccagaagtaacatgagtgttgccagaagcgatgatactctggatgaggaagactcctttgtgatgaaagccatcatccatgccatcaacgatgacaatgtcccaggcctgcagcaccttctgggctcattatccaactatgatgttaaccaacccaacaagcacgggacacctccattactcattgctgctggctgtgggaatattcaaatactacagttgctcattaaaagaggctcgagaatcgatgtccaggataagggcgggtccaatgccgtctactgggctgctcggcatggccacgtcgataccttgaaatttctcagtgagaacaaatgccctttggatgtgaaagacaagtctggagagatggccctccacgtggcagctcgctatggccatgctgacgtggctcaagttacttgtgcagcttcggctcaaatcccaatatccaggacaaaggaagaagaaacccccctgcactgtgctgcttggcacggctattactctgtggccaaagccctttgtgaagccggctgtaacgtgaacatcaagaaccgagaaggagagacgcccctcctgacagcctctgccaggggctaccacgacatcgtggagtgtctggccgaacatggagccgatcttaatgcttgcgacaaggacggacacattgcccttcatctggctgtaagacggtgtcagatggaggtaatcaagactctcctcagccaagggtgtttcgtcgattatcaagacaggcacggcaatactcccctccatgtggcatgtaaagatggcaacatgcctatcgtggtggccctctgtgaagcaaactgcaatttggacatctccaacaagtatgggcgaacgcctctgcaccttgcggccaacaacggaatcctagacgtggtccggtatctctgtctgatgggagccagcgttgaggcgctgaccacggacggaaagacggcagaagatcttgctagatcggaacagcacgagcacgtagcaggtctccttgcaagacttcgaaaggatacgcaccgaggactcttcatccagcagctccgacccacacagaacctgcagccaagaattaagctcaagctgtttggccactcgggatccgggaaaaccacccttgtagaatctctcaagtgtgggctgctgaggagctttttcagaaggcgtcggcccagactgtcttccaccaactccagcaggttcccaccttcacccctggcttctaagcccacagtctcagtgagcatcaacaacctgtacccaggctgcgagaacgtgagtgtgaggagccgcagcatgatgttcgagccgggtcttaccaaagggatgctggaggtgtttgtggccccgacccaccacccgcactgctcggccgatgaccagtccaccaaggccatcgacatccagaacgcttatttgaatggagttggcgatttcagcgtgtgggagttctctggaaatcctgtgtatttctgctgttatgactattttgctgcaaatgatcccacgtcaatccatgttgttgtctttagtctagaagagccctatgagatccagctgaaccaagtgattttctggctcagtttcctgaagtcccttgtcccagttgaagaacccatagccttcggtggcaagctgaagaacccactccaagttgtcctggtggccacccacgctgacatcatgaatgttcctcgaccggctggaggcgagtttggatatgacaaagacacatcgttgctgaaagagattaggaacaggtttggaaatgatcttcacatttcaaataagctgtttgttctggatgctggggcttctgggtcaaaggacatgaaggtacttcgaaatcatctgcaagaaatacgaagccagattgtttcggtctgtcctcccatgactcacctgtgtgagaaaatcatctccacgctgccttcctggaggaagctcaatggacccaaccagctgatgtcgctgcagcagtttgtgtacgacgtgcaggaccagctgaaccccctggccagcgaggaggacctcaggcgcattgctcagcagctccacagcacaggcgagatcaacatcatgcaaagtgaaacagttcaggacgtgctgctcctggacccccgctggctctgcacaaacgtcctggggaagttgctgtccgtggagaccccacgggcgctgcaccactaccggggccgctacaccgtggaggacatccagcgcctggtgcccgacagcgacgtggaggagctgctgcagatcctcgatgccatggacatctgcgcccgggacctgagcagcgggaccatggtggacgtcccagccctgatcaagacagacaacctgcaccgctcctgggctgatgaggaggacgaggtgatggtgtatggtggcgtgcgcatcgtgcccgtggaacacctcacccccttcccatgtggcatctttcacaaggtccaggtgaacctgtgccggtggatccaccagcaaagcacagagggcgacgcggacatccgcctgtgggtgaatggctgcaagctggccaaccgtggggccgagctgctggtgctgctggtcaaccacggccagggcattgaggtccaggtccgtggcctggagacggagaagatcaagtgctgcctgctgctggactcggtgtgcagcaccattgagaacgtcatggccaccacgctgccagggctcctgaccgtgaagcattacctgagcccccagcagctgcgggagcaccatgagcccgtcatgatctaccagccacgggacttcttccgggcacagactctgaaggaaacctcactgaccaacaccatgggggggtacaaggaaagcttcagcagcatcatgtgcttcgggtgtcacgacgtctactcacaggccagcctcggcatggacatccatgcatcagacctgaacctcctcactcggaggaaactgagtcgcctgctgcacccgcccgaccccctggggaaggactggtgccttctcgccatgaacttaggcctccctgacctcgtggcaaagtacaacaccagtaacggggctcccaaggatttcctccccagccccctccacgccctgctgcgggaatggaccacctaccctgagagcacagtgggcaccctcatgtccaaactgagggagctgggtcgccgggatgccgcagactttttgctgaaggcatcctctgtgttcaaaatcaacctggatggcaatggccaggaggcctatgcctcgagctgcaacagcggcacctcttacaattccattagctctgttgtatcccggtgagggcagcctctggcttgggcagggtctgtttggactgcagaagcaagggggtgatgtagcccatccttccctttggagatgctgagggtgtttcttcctgcacccacagccagggggatgccactcctccctccggcttgacctgtttctctgccgctacctccctccccgtctcattccgttgtctgtggatggtcattgcagtttaagagcagaacagatcttttactttggccgcttgaaaagctagtgtacctcctctcagtgttttggactccatctctcatcctccagtaccttgcttcttactgataattttgctggaattcctaacttttcaatgacattttttttaactactatattgattgtcctttaaaaaagaaaagtgcatatttatccaaaatgtgtatttcttatacgcttttctttgttataccatttcctcagcttatctcttttatatttgtaggagaaactcccatgtatggaatcccactgtatgatttataaacagacaatatgtgagtgccttttgcagaagagggtgtgtttgaaatcatcggagtcagccaggagctgtcaccaaggaaacgctacctctctgtcccttgctgtatgctgatcatcgccagaggtgcttcaccctgagttttgttttgtattgttttctgacagtttttctgttttgtttggcaaggaaaggggagaagggaatcctcctccagggtgattttatgatcagtgttgttgctctaggaagacatttttccgtttgcttttgttccaatgtcaatgtgaacgtccacatgaaacctacacactgtcatgcttcatcattccctctcatctcaggtagaaggttgacacagttgtagggttacagagacctatgtaagaattcagaagacccctgactcatcatttgtggcagtcccttataattggtgcatagcagatggtttccacatttagatcctggtttcataacttcctgtacttgaagtctaaaagcagaaaataaaggaagcaagttttcttccatgattttaaattgtgatcgagttttaaattgataggagggaacatgtcctaattcttctgtcctgagaagcatgtaatgttaatgttatatcatatgtatatatatatatgcactatgtatatacatatatattaatactggtatttttacttaatctataaaatgtcgttaaaaagttgtttgtttttttctttttttataaataaactgttgctcgttgcatt

SEQ ID NO: 66 - DNA, 3170 bp, Homo sapiens
  misc_feature: Template ID: 013521.17
caggccggcgccatggcctccgggagtgtggccgagtgcctgcagcaggagaccacctgccccgtgtgcctgcagtacttcgcagagcccatgatgctcgactgcggccataacatctgttgcgcgtgcctcgcccgctgctggggcacggcagagactaacgtgtcgtgcccgcagtgccgggagaccttcccgcagaggcacatgcggcccaaccggcacctggccaacgtgacccaactggtaaagcagctgcgcaccgagcggccgtcggggcccggcggcgagatgggcgtgtgcgagaagcaccgcgagcccctgaagctgtactgcgaggaggaccagatgcccatctgcgtggtgtgcgaccgctcccgcgagcaccgcggccacagcgtgctgccgctcgaggaggcggtggagggcttcaaggagcaaatccagaaccagctcgaccatttaaaaagagtgaaagatttaaagaagagacgtcgggcccagggggaacaggcacgagctgaactcttgagcctaacccagatggagagggagaagattgtttgggagtttgagcagctgtatcactccttaaaggagcatgagtatcgcctcctggcccgccttgaggagctagacttggccatctacccatagcatcaatggtgccatcaacccagttctcttgcaacatctcccacctcagcagcctgatcgctcagctagaagagaagcagcagcagcccaccagggagctcctgcaggacattggggacacattgagcagggctgaaagaatcaggattcctgaaccttggatcacacctccagatttgcaagagaaaatccacatttttgccccaaaatgtctattcttgacggagagtctaaagcagttcacagaaaaaatgcagtcagatatggagaaaatccaagaattaagagaggctcagttatactcagggggcagcattgttgggggacacgagcctggggagccccgggggattaaagctggctatggcacctgcaactgcttccctgaggaggagaagtgcttctgcgagcccgaagacatccaggatccactgtgcgacgagctgtgccgcacggtgatcgcagccgctgtcctcttctccttcgtcgtctcggtgctgctgtctgccttctgcatccactgctaccacaagtttgcccacaagccacccatctcctcagctgagatgaccttccggaggcccgcccaggcctacccggtcagctactcctcttccagtgcccgccggccctcgctggactccatggagaaccaggtctccgtggatgccttcaagatcctggaggatccaaagtgggaattccctcggaagaacttggttcttggaaaaactctaggagaaggcgaatttggaaaagtggtcaaggcaacggccttccatctgaaaggcagagcagggtacaccacggtggccgtgaagatgctgaaagagaacgcctccccgagtgagcttcgagacctgctgtcagagttcaacgtcctgaagcaggtcaaccacccacatgtcatcaaattgtatggggcctgcagccaggatggcccgctcctcctcatcgtggagtacgccaaatacggctccctgcggggcttcctccgcgagagccgcaaagtggggcctggctacctgggcagtggaggcagccgcaactccagctccctggaccacccggatgagcgggccctcaccatgggcgacctcatctcatttgcctggcagatctcacaggggatgcagtatctggccgagatgaagctcgttcatcgggacttggcagccagaaacatcctggtagctgaggggcggaagatgaagatttcggatttcggcttgtcccgagatgtttatgaagaggattcctacgtgaagaggagccagggtcggattccagttaaatggatggcaattgaatccctttttgatcatatctacaccacgcaaagtgatgtatggtcttttggtgtcctgctgtgggagatcgtgaccctagggggaaacccctatcctgggattcctcctgagcggctcttcaaccttctgaagaccggccaccggatggagaggccagacaactgcagcgaggagatgtaccgcctgatgctgcaatgctggaagcaggagccggacaaaaggccggtgtttgcggacatcagcaaagacctggagaagatgatggttaagaggagagactacttggaccttgcggcgtccactccatctgactccctgatttatgacgacggcctctcagaggaggagacaccgctggtggactgtaataatgcccccctccctcgagccctcccttccacatggattgaaaacaaactctatggtagaatttcccatgcatttactagattctagcaccgctgtcccctctgcactatccttcctctctgtgatgctttttaaaaatgtttctggtctgaacaaaaccaaagtctgctctgaacctttttatttgtaaatgtctgactttgcatccagtttacatttaggcattattgcaactatgtttttctaaaaggaagtgaaaataagtgtaattaccacattgcccagcaacttaggatggtagaggaaaaaacagatcagggcggaactctcaggggagaccaagaacaggttgaataaggcgcttctggggtgggaatcaagtcatagtacttctactttaactaagtggataaatatacaaatctggggaggtattcagttgagaaaggagccaccagcaccactcagcctgcactgggagcacagccaggttcccccagacccctcctgggcaggcaggtgcctctcagaggccacccggcactggcgagcagccactggccaagcctcagccccagtcccagccacatgtcctccatcaggggtagcgaggttgcaggagctggctggccctgggaggacgcacccccactgctgttttcacatcctttcccttacccaccttcaggacggttgtcacttatgaagtcagtgctaaagctggagcagttgctttttgaaagaacatggtctgtggtgctgtggtcttacaatggacagtaaatatggttcttgccaaaactccttcttttgtcttcgattaaatactagaaattt

SEQ ID NO: 67 - DNA, 5355 bp, Homo sapiens
  misc_feature: Template ID: 013521.18
cagatccagttgttctcatgcagccgtgtgcggtacgtgccgtagagatgctggcccaggcggaagctgggcacctccttactgtacttccataccctatggaagtacagtaaggaggtgcccagcttccgcctgggccagcatctctacggcacgtaccgcacacggctgcatgagaacaactggatctgcatccaggaggacaccggcctcctctaccttaaccggagcctggaccatagctcctgggagaagctcagtgtccgcaaccgcggctttcccctgctcaccgtctacctcaaggtcttcctgtcacccacatcccttcgtgagggcgagtgccagtggccaggctgtgcccgcgtatacttctccttcttcaacacctcctttccagcctgcagctccctcaagccccgggagctctgcttcccagagacaaggccctccttccgcattcgggagaaccgacccccaggcaccttccaccagttccgcctgctgcctgtgcagttcttgtgccccaacatcagcgtggcctacaggctcctggagggtgagggtctgcccttccgctgcgccccggacagcctggaggtgagcacgcgctgggccctggaccgcgagcagcgggagaagtacgagctggtggccgtgtgcaccgtgcacgccggcgcgcgcgaggaggtggtgatggtgcccttcccggtgaccgtgtacgacgaggacgactcggcgcccaccttccccgcgggcgtcgacaccgccagcgccgtggtggagttcaagcggaaggaggacaccgtggtggccacgctgcgtgtcttcgatgcagacgtggtacctgcatcaggggagctggtgaggcggtacacaagcacgctgctccccggggacacctgggcccagcagaccttccgggtggaacactggcccaacgagacctcggtccaggccaacggcagcttcgtgcgggcgaccgtacatgactataggctggttctcaaccggaacctctccatctcggagaaccgcaccatgcagctggcggtgctggtcaatgactcagacttccagggcccaggagcgggcgtcctcttgctccacttcaacgtgtcggtgctgccggtcagcctgcacctgcccagtacctactccctctccgtgagcaggagggctcgccgatttgcccagatcgggaaagtctgtgtggaaaactgccaggcgttcagtggcatcaacgtccagtacaagctgcattcctctggtgccaactgcagcacgctaggggtggtcacctcagccgaggacacctcggggatcctgtttgtgaatgacaccaaggccctgcggcggcccaagtgtgccgaacttcactacatggtggtggccaccgaccagcagacctctaggcaggcccaggcccagctgcttgtaacagtggaggggtcatatgtggccgaggaggcgggctgccccctgtcctgtgcagtcagcaagagacggctggagtgtgaggagtgtggcggcctgggctccccaacaggcaggtgtgagtggaggcaaggagatggcaaagggatcaccaggaacttctccacctgctctcccagcaccaagacctgccccgacggccactgcgatgttgtggagacccaagacatcaacatttgccctcaggactgcctccggggcagcattgttgggggacacgagcctggggagccccgggggattaaagctggctatggcacctgcaactgcttccctgaggaggagaagtgcttctgcgagcccgaagacatccaggatccactgtgcgacgagctgtgccgcacggtgatcgcagccgctgtcctcttctccttcatcgtctcggtgctgctgtctgccttctgcatccactgctaccacaagtttgcccacaagccacccatctcctcagctgagatgaccttccggaggcccgcccaggccttcccggtcagctactcctcttccggtgcccgccggccctcgctggactccatggagaaccaggtctccgtggatgccttcaagatcctggaggatccaaagtgggaattccctcggaagaacttggttcttggaaaaactctaggagaaggcgaatttggaaaagtggtcaaggcaacggccttccatctgaaaggcagagcagggtacaccacggtggccgtgaagatgctgaaagagaacgcctccccgagtgagcttcgagacctgctgtcagagttcaacgtcctgaagcaggtcaaccacccacatgtcatcaaattgtatggggcctgcagccaggatggcccgctcctcctcatcgtggagtacgccaaatacggctccctgcggggcttcctccgcgagagccgcaaagtggggcctggctacctgggcagtggaggcagccgcaactccagctccctggaccacccggatgagcgggccctcaccatgggcgacctcatctcatttgcctggcagatctcacaggggatgcagtatctggccgagatgaagctcgttcatcgggacttggcagccagaaacatcctggtagctgaggggcggaagatgaagatttcggatttcggcttgtcccgagatgtttatgaagaggattcctacgtgaagaggagccagggtcggattccagttaaatggatggcaattgaatccctttttgatcatatctacaccacgcaaagtgatgtatggtcttttggtgtcctgctgtgggagatcgtgaccctagggggaaacccctatcctgggattcctcctgagcggctcttcaaccttctgaagaccggccaccggatggagaggccagacaactgcagcgaggagatgtaccgcctgatgctgcaatgctggaagcaggagccggacaaaaggccggtgtttgcggacatcagcaaagacctggagaagatgatggttaagaggagagactacttggaccttgcggcgtccactccatctgactccctgatttatgacgacggcctctcagaggaggagacaccgctggtggactgtaataatgcccccctccctcgagccctcccttccacatggattgaaaacaaactctatggcatgtcagacccgaactggcctggagagagtcctgtaccactcacgagagctgatggcactaacactgggtttccaagatatccaaatgatagtgtatatgctaactggatgctttcaccctcagcggcaaaattaatggacacgtttgatagttaacatttctttgtgaaaggtaatggactcacaaggggaagaaacatgctgagaatggaaagtctaccggccctttctttgtgaacgtcacattggccgagccgtgttcagttcccaggtggcagactcgtttttggtagtttgttttaacttccaaggtggttttacttctgatagccggtgattttccctcctagcagacatgccacaccgggtaagagctctgagtcttagtggttaagcattcctttctcttcagtgcccagcagcacccagtgttggtctgtgtccatcagtgaccaccaacattctgtgttcacatgtgtgggtccaacacttactacctggtgtatgaaattggacctgaactgttggatttttctagttgccgccaaacaaggcaaaaaaatttaaacatgaagcacacacacaaaaaaggcagtaggaaaaatgctggccctgatgacctgtccttattcagaatgagagactgcggggggggcctgggggtagtgtcaatgcccctccagggctggaggggaagaggggccccgaggatgggcctgggctcagcattcgagatcttgagaatgatttttttttaatcatgcaacctttccttaggaagacatttggttttcatcatgattaagatgattcctagatttagcacaatggagagattccatgccatctttactatgtggatggtggtatcagggaagagggctcacaagacacatttgtcccccgggcccaccacatcatcctcacgtgttcggtactgagcagccactacccctgatgagaacagtatgaagaaagggggctgttggagtcccagaattgctgacagcagaggctttgctgctgtgaatcccacctgccaccagcctgcagcacaccccacagccaagtagaggcgaaagcagtggctcatcctacctgttaggagcaggtagggcttgtactcactttaatttgaatcttatcaacttactcataaagggacaggctagctagctgtgttagaagtagcaatgacaatgaccaaggactgctacacctctgattacaattctgatgtgaaaaagatggtgtttggctcttatagagcctgtgtgaaaggcccatgggatcagctcttcctgtgtttgtaatttaatgctgctacaagatgtttctgtttcttagattctgaccatgactcataagcttcttgtcattcttcattgcttgtttgtggtcacagatgcacaacactcctccagtcttgtgggggcagcttttgggaagtctcagcagctcttctggctgtgttgtcagcactgtaacttcgcagaaaagagtcggattaccaaaacactgcctgctcttcagacttaaagcactgataggacttaaaatagtctcattcaaatactgtattttatataggcatttcacaaaaacagcaaaattgtggcattttgtgaggccaaggcttggatgcgtgtgtaatagagccttatggtgtgtgcgcacacacccagagggagagtttgaaaaatgcttattggacacgtaacctggctctaatttgggctgtttttcagatacactgtgataagttcttttacaaatatctatagacatggtaaacttttggttttcagatatgcttaatgatagtcttactaaatgcagaaataagaataaactttctcaaattattaaaaatgcctacacagtaagtgtgaattgctgcaacaggtttgttctcaggagggtaagaactccaggtctaaacagctgacccagtgatggggaatttatccttgaccaatttatccttgaccaataacctaattgtctattcctgagttataaaagtccccatccttattagctctactggaattttcatacacgtaaatgcagaagttactaagtattaagtattactgagtattaagtagtaatctgtcagttattaaaatttgtaaaatctatttatgaaaggtcattaaaccagatcatgttcctttttttgtaatcaaggtgactaagaaaatcagttgtgtaaataaaatcatgtatcat

SEQ ID NO: 68 - DNA, 4978 bp, Homo sapiens
  misc_feature: Template ID: 032942.8
  unsure 4692: a, t, c, g, or other
ctgttgcacgttcatgtggcccatcgttcagcagctgtttgtggttggcccacttgaggctgagacttctggctctgccttgggagatgtcagtctcccccaagttacaggccccgtgcacatatccataagccagagacagagcctggaggggagagggacttgagaaggcctgactggggaggaacagcctgggaaggaggcttgggccctttgtaggtgttcgggtgacaatccagcccagcccatccgctggttccctgagcttgatccatcctcttctttcctggggacaagctgacagcagccatggcgagcggcagtggagacagcgtcacccgtcggagcgtggcatcacagtttttcactcaagaggaggggccgggcatcgatggcatgaccacctcagagagggtggtggatcttctgaaccaggcggcgctgatcaccaatgactcaaagatcacagtgctcaaacaggtccaggagctgatcatcaacaaagaccccacactactggacaacttcctggatgagatcatcgcattccaagcagacaagtcaatcgaagtgcgaaaatttgtcatcggcttcatcgaggaggcatgcaagcgagacattgagttgctgctgaaactcattgcaaacctcaacatgctcttgagggacgagaatgtgaacgtggtgaagaaggctatcctcaccatgacccagctctacaaggtggccctgcagtggatggtaaagtcacgggtcattagcgagctacaggaggcctgctgggacatggtatctgccatggcggcgactgcggcaaagcgagagcctcggagacgccgctgccgccagcacagccggagacctgagccgacactgggggcagtccgcgagccccgcactctctcgatgagtcggagaagtcccgttgtatcagagtaagatggacggtagctttgattgtgattgtggtgagctggagccacctgatcactaacaaaagacatcttctgttaaccaacagccgccagggcttcctgttgaaataaatatatagcaacaaaggaaaaaaagaagcaaaacggaaatagtgcttaccagcaccttagaatgatgctgctcaggaccagtccaacactgaatgtatctgcactgtgaggagaatgttcatagaagcctgttgtgtgcatatttattcacatttttgttaaatgttaaatcgtttagcacggtaatctgagtgcacagtatgtcatttcattccgtttgagtttcttgttttcgttaaatgtctgcagagttgctgcccctttcttgaactatgagtactgcaatctttttaattctcaatatgaatagagcttttgagcttaaatctaaggggaactcgacaggcctgtttggcatatgcaatgaacatcaagaaaccatcttgctgtggaagcataattatttttcttctccctttttgaaagatctttccttttgatgccagttttcttccttgtttacacaagttcaatttgaaaggaaaaggcaatagtaagggtttcaaaatggcagagaaatttgaaagtctcatgaacattcatggttttgatctgggttctaggtatatggacttaaaaccattgggttgtggaggcaatggcttggttttttctgctgtagacaatgactgtgacaaaagagtagccatcaagaaaattgtccttactgatccccagagtgtcaaacatgctctacgtgaaatcaaaattattagaagacttgaccatgataacattgtgaaagtgtttgagattcttggtcccagtggaagccaattaacagacgatgtgggctctcttacggaactgaacagtgtttacattgttcaggagtacatggagacagacttggctaatgtgctggagcagggccctttactggaagagcatgccaggcttttcatgtatcagctgctacgggggctcaagtatattcactctgcaaatgtactgcacagagatctcaaaccagctaatcttttcattaatacggaagacttggtgctgaagataggtgactttggtcttgcacggatcatggatcctcattattcccataagggtcatctttctgaaggattggttactaaatggtacagatctccacgtcttttactttctcctaataattatactaaagccattgacatgtgggctgcaggctgcatctttgctgaaatgctgactggtaaaaccctttttgcaggtgcacatgaacttgaacagatgcagctgattttagaatctattcctgttgtacatgaggaagatcgtcaggagcttctcagcgtaattccagtttacattagaaatgacatgactgagccacacaaacctttaactcagctgcttccaggaattagtcgagaagcactggatttcctggaacaaattttgacatttagccccatggatcggttaacagcagaagaagcactctcccatccttacatgagcatatattcttttccaatggatgagccaatttcaagccatccttttcatattgaagatgaagttgatgatattttgcttatggatgaaactcacagtcacatttataactgggaaaggtatcatgattgtcagttttcagagcatgattggcctgtacataacaactttgatattgatgaagttcagcttgatccaagagctctgtccgatgtcactgatgaagaagaagtacaagttgatccccgaaaatatttggatggagatcgggaaaagtatctggaggatcctgcttttgataccaattactctactgagccttgttggcaatactcagatcatcatgaaaacaaatattgtgatctggagtgtagccatacttgtaactacaaaacgaggtcatcatcatatttagataacttagtttggagagagagtgaagttaaccattactatgaacccaagcttattatagatctttccaattggaaagaacaaagcaaagaaaaatctgataagaaaggcaaatcaaaatgtgaaaggaatggattggttaaagcccagatagcgctagaggaagcatcacagcaactggctggaaaagaaagggaaaagaatcagggatttgattttgattcctttattgcaggaactattcagcttagttcccagcatgagcctactgatgttgttgataaattaaatgacttgaatagctcagtgtcccaactagaattgaaaagtttgatatcaaagtcagtaagccaagaaaaacaggaaaaaggaatggcaaatctggctcaattagaagccttgtaccagtcttcttgggacagccagtttgtgagtggtggggaggactgttttttcataaatcagttttgtgaggtaaggaaggatgaacaagttgagaaggaaaacacttacactagttacttggacaagttctttagcaggaaagaagatactgaaatgctagaaactgagccagtagaggatgggaagcttggggagagaggacatgaggaaggatttctgaacaacagtggggagttcctctttaacaagcagctcgagtccataggcatcccacagtttcacagtccagttgggtcaccacttaagtcaatacaggccacattaacaccttctgctatgaaatcttcccctcaaattcctcatcaaacatacagcagcattctgaaacatctgaactaaaacactcagcagacatttatctttgtattcttcatgaaatgtgttttgtctttttttattactagtgtttaagtcattttttacttgaatcagatggtgtcatttagtaaggattttatgagttcttgttttttaaaatccagactttctttttctacatgtgagatagttttcattttaactggcatgtcatttgcacacaaaaataaagactagagcaaaataatgcaacgcaggaggagaaaagaaatgcactaagacaagaacattctctcatagaacattgatctgttttacaggaaacaaaccttgccttgaaatttacacagtgagactgtacataattgcatgaaaatagctatttttttcctaagacatttttcattcatgaatattttcaagtttttcatactgtacacatttcttaaaacacatgataccagcagcaactgaaaatgaatgccgaatttggtacacatgtgttatctacctcaaggtaacaagagtatgtggcaaaacatataccacccatagtgcttcacaaaatgcacttctatttagccagcgtttattgtagtaaactattcttaataaaactcactcactgtttataaatgttctggtatgcattctttatagtgaagtgttaatacatcacatcttatttattttagcaaatcagtatattttctgtatttaattataaaaaattaacttagtttttaaaatttatttgcaaatatactttttccatttggcactatggtttgttgcctacctagctgcatctataatgtcagcttatcctaaggctgtccacgtacttaatttacttaagtgttcattttaagtaacgtgctcactgtgtataggaatttgtattttggaggtgcttgatctatctacaaagaaaaattaattaggaattactttattataaaatgctcctagaagtcttaattgtgtttatttnttaaaaagacaaatgttagacttgtgtgcatggaagtaattaaggtacatcattattgtagtttgaaagttgtacatgataagacattttgtttttactgtatgtttttactgaatgatctattccccatcccaaggcaagcatgaataaaattaggttaaacgtagcatgtggcatcgcagtctcttagaatttgtttcatctattttattttattgaatactgtctgtatctttggttatcctgtttgaagaaaaaggacaaataaaacatggccagcaaatac

SEQ ID NO: 69 - DNA, 2792 bp, Homo sapiens
  misc_feature: Template ID: 149914.21
  unsure 2789: a, t, c, g, or other
ctgcctcgcgcagggggtgtgcgaggctgagtccaagagatagcaaatcgagtcttaaataatccggggagaaagacgcccgggtagatttgaggtgcagccttggagggagggattagaagccgctagactttttttcctcccctctcagtagcacggagtccgaattaattggatttcattcactggggaggaacaaaaactatctgggcagcttcattgagagagattcattgacactaagagccagcggctgcagctgggtgcagagagaacctccggctttacttctgtctcgtctgccccaaccgctagcctcggcttgggtaaggcgaggcggaattaaaccccgctccgagagcggcagcttcgcgcgcggtgcgctcggcctatgcctgccccgaggggcgtctggtaggcaccccgccctctcccgcagctcgacccccatgatagatacgctcagacccgtgcccttcgcgtcggaaatggcgatcagcaagacggtggcgtggctcaacgagcagctggagctgggcaacgagcggctgctgctgatggactgccggccgcaggagctatacgagtcgtcgcacatcgagtcggccatcaacgtggccatcccgggcatcatgctgcggcgcctgcagaagggtaacctgccggtgcgcgcgctcttcacgcgcggcgaggaccgggaccgcttcacccggcgctgtggcaccgacacagtggtgctctacgacgagagcagcagcgactggaacgagaatacgggcggcgagtcgttgctcgggctgctgctcaagaagctcaaggacgagggctgccgggcgttctacctggaaggtggcttcagtaagttccaagccgagttctccctgcattgcgagaccaatctagacggctcgtgtagcagcagctcgccgccgttgccagtgctggggctcgggggcctgcggatcagctctgactcttcctcggacatcgagtctgaccttgaccgagaccccaatagtgcaacagactcggatggtagtccgctgtccaacagccagccttccttcccagtggagatcttgcccttcctctacttgggctgtgccaaagactccaccaacttggacgtgttggaggaattcggcatcaagtacatcttgaacgtcacccccaatttgccgaatctctttgagaacgcaggagagtttaaatacaagcaaatccccatctcggatcactggagccaaaacctgtcccagtttttccctgaggccatttctttcatagatgaagcccggggcaagaactgtggtgtcttggtacattgcttggctggcattagccgctcagtcactgtgactgtggcttaccttatgcagaagctcaatctgtcgatgaacgatgcctatgacattgtcaaaatgaaaaaatccaacatatcccctaacttcaacttcatgggtcagctgctggacttcgagaggacgctgggactcagcagcccatgtgacaacagggttccagcacagcagctgtattttaccaccccttccaaccagaatgtataccaggtggactctctgcaatctacgtgaaagaccccacacccctccttgctggaatgtgtctggcccttcagcagtttctcttggcagcatcagctgggctgctttctttgtgtgtggccccaggtgtcaaaatgacaccagctgtctgtactagacaaggttaccaagtgcggaattggttaatactaacagagagatttgctccattctctttggaataacaggacatgctgtatagatacaggcagtaggtttgctctgtacccatgtgtacagcctacccatgcagggactgggattcgaggacttccaggcgcatagggtagaaccaaatgatagggtaggagcatgtgttctttagggccttgtaaggctgtttccttttgcatctggaactgactatataattgtcttcaatgaagactaattcaattttgcatatagaggagccaaagagagatttcagctctgtatttgtggtatcagtttggaaaaaaaaatctgatactccatttgattattgtaaatatttgatcttgaatcacttgacagtgtttgtttgaattgtgtttgttttttcctttgatgggcttaaaagaaattatccaaagggagaaagagcagtatgccacttcttaaaacagaacaaaacaaaaaaagaaaattgtgctcttttctaatccaaagggtatatttgcagcatgcttgactttaccaattctgatgacatctttacggacactattatcactaagaccttgttatggcgaagtctttagtctttttcatgtattttcctcatgattttttctctttatgtagtttgactatgccttacctttgtaaatatttttgcttgtgttgtcgcaaaggggataatctgggaaagacaccaaatcatgggctcactttaaaaaaagaaagaataaaaaaaccttcagctgtgctaaacagtatattacctctgtataaaattcttcagggagtgtcacctcaaatgcaatactttgggttggtttctttcctttaaaaaaatttgtataaaactggaagtgtgtgtgtgtgagcatgggtacccatttgataagagaaatgcatttgattgtgaagaagggagagttaaattctccattatgttcgtggtgtaaagtttagagctggaatttattataagaatgtaaaaccttaaattattaataaataactattttggctattganaaa

SEQ ID NO: 70 - DNA, 4606 bp, Homo sapiens
  misc_feature: Template ID: 276948.4
gctgcttgaggaagtataagaatgaagttgtgaagctgagattcccctccattgggaccggagaaaccaggggagccccccgggcagccgcgcgccccttcccacggggccctttactgcgccgcgcgcccggcccccacccctcgcagcaccccgcgccccgcgccctcccagccgggtccagccggagccatggggccggagccgcagtgagcaccatggagctggcggccttgtgccgctgggggctcctcctcgccctcttgccccccggagccgcgagcacccaagtgtgcaccggcacagacatgaagctgcggctccctgccagtcccgagacccacctggacatgctccgccacctctaccagggctgccaggtggtgcagggaaacctggaactcacctacctgcccaccaatgccagcctgtccttcctgcaggatatccaggaggtgcagggctacgtgctcatcgctcacaaccaagtgaggcaggtcccactgcagaggctgcggattgtgcgaggcacccagctctttgaggacaactatgccctggccgtgctagacaatggagacccgctgaacaataccacccctgtcacaggggcctccccaggaggcctgcgggagctgcagcttcgaagcctcacagagatcttgaaaggaggggtcttgatccagcggaacccccagctctgctaccaggacacgattttgtggaaggacatcttccacaagaacaaccagctggctctcacactgatagacaccaaccgctctcgggcctgccacccctgttctccgatgtgtaagggctcccgctgctggggagagagttctgaggattgtcagagcctgacgcgcactgtctgtgccggtggctgtgcccgctgcaaggggccactgcccactgactgctgccatgagcagtgtgctgccggctgcacgggccccaagcactctgactgcctggcctgcctccacttcaaccacagtggcatctgtgagctgcactgcccagccctggtcacctacaacacagacacgtttgagtccatgcccaatcccgagggccggtatacattcggcgccagctgtgtgactgcctgtccctacaactacctttctacggacgtgggatcctgcaccctcgtctgccccctgcacaaccaagaggtgacagcagaggatggaacacagcggtgtgagaagtgcagcaagccctgtgcccgagtgtgctatggtctgggcatggagcacttgcgagaggtgagggcagttaccagtgccaatatccaggagtttgctggctgcaagaagatctttgggagcctggcatttctgccggagagctttgatggggacccagcctccaacactgccccgctccagccagagcagctccaagtgtttgagactctggaagagatcacaggttacctatacatctcagcatggccggacagcctgcctgacctcagcgtcttccagaacctgcaagtaatccggggacgaattctgcacaatggcgcctactcgctgaccctgcaagggctgggcatcagctggctggggctgcgctcactgagggaactgggcagtggactggccctcatccaccataacacccacctctgcttcgtgcacacggtgccctgggaccagctctttcggaacccgcaccaagctctgctccacactgccaaccggccagaggacgagtgtgtgggcgagggcctggcctgccaccagctgtgcgcccgagggcactgctggggtccagggcccacccagtgtgtcaactgcagccagttccttcggggccaggagtgcgtggaggaatgccgagtactgcaggggctccccagggagtatgtgaatgccaggcactgtttgccgtgccaccctgagtgtcagccccagaatggctcagtgacctgttttggaccggaggctgaccagtgtgtggcctgtgcccactataaggaccctcccttctgcgtggcccgctgccccagcggtgtgaaacctgacctctcctacatgcccatctggaagtttccagatgaggagggcgcatgccagccttgccccatcaactgcacccactcctgtgtggacctggatgacaagggctgccccgccgagcagagagccagccctctgacgtccatcatctctgcggtggttggcattctgctggtcgtggtcttgggggtggtctttgggatcctcatcaagcgacggcagcagaagatccggaagtacacgatgcggagactgctgcaggaaacggagctggtggagccgctgacacctagcggagcgatgcccaaccaggcgcagatgcggatcctgaaagagacggagctgaggaaggtgaaggtgcttggatctggcgcttttggcacagtctacaagggcatctggatccctgatggggagaatgtgaaaattccagtggccatcaaagtgttgagggaaaacacatcccccaaagccaacaaagaaatcttagacgaagcatacgtgatggctggtgtgggctccccatatgtctcccgccttctgggcatctgcctgacatccacggctgcagctggtgacacagcttatgccctatggctgcctcttagaccatgtccgggaaaaccgcggacgcctgggctcccaggacctgctgaactggtgtatgcagattgccaaggggatgagctacctggaggatgtgcggctcgtacacagggacttggccgctcggaacgtgctggtcaagagtcccaaccatgtcaaaattacagacttcgggctggctcggctgctggacattgacgagacagagtaccatgcagatgggggcaaggtgcccatgcaagtggatggcgctggagtccattctccgccggcggttcacccaccagagtgatgtgtggagttatggtgtgactgtgtgggagctgatgacttttggggccaaaccttacgatgggatcccagcccgggagatccctgacctgctggaaaagggggagcggctgccccagccccccatctgcaccattgatgtctacatgatcatggtcaaatgttggatgattgactctgaatgtcggccaagattccgggagttggtgtctgaattctcccgcatggccagggacccccagcgctttgtggtcatccagaatgaggacttgggcccagccagtcccttggacagcaccttctaccgctcactgctggaggacgatgacatgggggacctggtggatgctgaggagtatctggtaccccagcagggcttcttctgtccagaccctgccccgggcgctgggggcatggtccaccacaggcaccgcagctcatctaccaggagtggcggtggggacctgacactagggctggagccctctgaagaggaggcccccaggtctccactggcaccctccgaaggggctggctccgatgtatttgatggtgacctgggaatgggggcagccaaggggctgcaaagcctccccacacatgaccccagccctctacagcggtacagtgaggaccccacagtacccctgccctctgagactgatggctacgttgcccccctgacctgcagcccccagcctgaatatgtgaaccagccagatgttcggccccagcccccttcgccccgagagggccctctgcctgctgcccgacctgctggtgccactctggaaaggcccaagactctctccccagggaagaatggggtcgtcaaagacgtttttgcctttgggggtgccgtggagaaccccgagtacttgacaccccagggaggagctgcccctcagccccaccctcctcctgccttcagcccagccttcgacaacctctattactgggaccaggacccaccagagcggggggctccacccagcaccttcaaagggacacctacggcagagaacccagagtacctgggtctggacgtgccagtgtgaaccagaaggccaagtccgcagaagccctgatgtgtcctcagggagcagggaaggcctgacttctgctggcatcaagaggtgggagggccctccgaccacttccaggggaacctgccatgccaggaacctgtcctaaggaaccttccttcctgcttgagttcccagatggctggaaggggtccagcctcgttggaagaggaacagcactggggagtctttgtggattctgaggccctgcccaatgagactctagggtccagtggatgccacagcccagcttggccctttccttccagatcctgggtactgaaagccttagggaagctggcctgagaggggaagcggccctaagggagtgtctaagaacaaaagcgacccattcagagactgtccctgaaacctagtactgccccccatgaggaaggaacagcaatggtgtcagtatccaggctttgtacagagtgcttttctgtttagtttttactttttttgttttgtttttttaaagatgaaataaagacccagggggagaatgggtgttgtatggggaggcaagtgtggggggtccttctccacacccactttgtccatttgcaaatatattttggaaaacaaaaa

SEQ ID NO: 71 - DNA, 215 bp, Homo sapiens
  misc_feature: Template ID: 347283.16
  unsure 174: a, t, c, g, or other
gcgggcctgtccaggggctccccgccccaccccacgccttagctgcaggcccttttgggcaaaggggcccatcctagacctgggccatccattccattttgttccacatttcctttctactctttctgccaagagcctgcccctgcatttgtcctgggaaacacggtatttaanagagaactatattggtattaaagctggtttgttttaaaaaa

SEQ ID NO: 72 - DNA, 2519 bp, Homo sapiens
  misc_feature: Template ID: 349727.2
  unsure 104, 110, 114, 131: a, t, c, g, or other
cggctcctctttgcagagggggaaactcttgggctgagagcaggaataatgcggtaggcaaggcgggctgctggctcccccggctccggcagcagcggcggcancccgancagnggcagtagcagcggcancattcccaggcgctgacagccccgccggccggctccgttgctgaccgccgactgtcaatggagctggaaaacatcgtggccaacacggtcttgctgaaagccagggaagggggcggaggaaagcgcaaagggaaaagcaagaagtggaaagaaatcctgaagttccctcacattagccagtgtgaagacctccgaaggaccatagacagagattactgcagtttatgtgacaagcagccaatcgggaggctgcttttccggcagttttgtgaaaccaggcctgggctggagtgttacattcagttcctggactccgtggcagaatatgaagttactccagatgaaaaactgggagagaaagggaaggaaattatgaccaagtacctcaccccaaagtcccctgttttcatagcccaagttggccaagacctggtctcccagacggaggagaagctcctacagaagccgtgcaaagaactcttttctgcctgtgcacagtctgtccacgagtacctgaggggagaaccattccacgaatatctggacagcatgttttttgaccgctttctccagtggaagtggttggaaaggcaaccggtgaccaaaaacactttcaggcagtatcgagtgctaggaggagggggcttcggggaggtctgtgcctgccaggttcgggccacgggtaaaatgtatgcctgcaagcgcttggagaagaagaggatcaaaaagaggaaaggggagtccatggccctcaatgagaagcagatcctcgagaaggtcaacagtcagtttgtggtcaacctggcctatgcctacgagaccaaggatgcactgtgcttggtcctgaccatcatgaatgggggtgacctgaagttccacatctacaacatgggcaaccctggcttcgaggaggagcgggccttgttttatgcggcagagatcctctgcggcttagaagacctccaccgtgagaacaccgtctaccgagatctgaaacctgaaaacatcctgttagatgattatggccacattaggatctcagacctgggcttggctgtgaagatccccgagggagacctgatccgcggccgggtgggcactgttggctacatggctccagaggtcctgaacaaccagaggtacggcctgagccccgactactggggccttggctgcctcatctatgagatgatcgagggccagtcgccgttccgcggccgcaaggagaaggtgaagcgggaggaggtggaccgccgggtcctggagacggaggaggtgtactcccacaagttctccgaggaggccaagtccatctgcaagatgctgctcacgaaagatgcgaagcagaggctgggctgccaggaggagggggctgcagaggtcaagagacaccccttcttcaggaacatgaacttcaagcgcttagaagccgggatgttggaccctcccttcgttccagacccccgcgctgtgtactgtaaggacgtgctggacatcgagcagttctccactgtgaagggcgtcaatctggaccacacagacgacgacttctactccaagttctccacgggctctgtgtccatcccatggcaaaacgagatgatagaaacagaatgctttaaggagctgaacgtgtttggacctaatggtaccctcccgccagatctgaacagaaaccaccctccggaaccgcccaagaaagggctgctccagagactcttcaagcggcagcatcagaacaattccaagagttcgcccagctccaagaccagttttaaccaccacataaactcaaaccatgtcagctcgaactccaccggaagcagctagtttcggctctggcctccaagtccacagtggaaccagcccagacccttctccttagaagtggaagtagtggagcccctgctctggtggggctgccaggggagaccccgggagccggggaaggaggccgtccatcccgtcgacgtagaacctcgaggtttctcaaagaaatttccactcaggtctgttttccgaggcggccccggccggggtggattggatttgtctttggtgaacattgcaatagaaatccaattggatacgacaacttgcacgtattttaatagcgtcataactagaactgaattttgtctttatgatttttaaagaaaagttttgtaaatttctctactgtctcagtttacattttgtatatttgtatttaaatgaaagtgagactttgagggtgtatattttctgtgcagccactgttaagccatgtgttccaaggcattttagcggggagggggttatcaaaaaaaaaaaaatgtgactcaagacttccagagcctcaaatgagaaaatgtctttattaaatgtagaaagtgatccataaaaaaa

SEQ ID NO: 73 - DNA, 4498 bp, Homo sapiens
  misc_feature: Template ID: 350230.2
gcactgctgctgccaccgccgtcgccgccgcgccgccgcgccgctgctgctgccggtgctaaggagttcgctggagccctttcctcagacccggcccggtcttcgcgcccggactcctggcgccagcgctaggcgcactcaccgctctgacgggtgcagacgcgggagttgtcccagactgtggagtggcgggcacggccccagccccccttcccttccctgaccccttcttgccatcgccccagacatggggaacgcggcgaccgccaagaaaggcagcgaggtggagagcgtgaaagagtttctagccaaagccaaagaagactttttgaaaaaatgggagaatccaactcagaataatgccggacttgaagattttgaaaggaaaaaaacccttggaacaggttcatttggaagagtcatgttggtaaaacacaaagccactgaacagtattatgccatgaagatcttagataagcagaaggttgttaaactgaagcaaatagagcatactttgaatgagaaaagaatattacaggcagtgaattttcctttccttgttcgactggagtatgcttttaaggataattctaatttatacatggttatggaatatgtccctgggggtgaaatgttttcacatctaagaagaattggaaggttcagtgagccccatgcacggttctatgcagctcagatagtgctaacattcgagtacctccattcactagacctcatctacagagatctaaaacctgaaaatctcttaattgaccatcaaggctatatccaggtcacagactttgggtttgccaaaagagttaaaggcagaacttggacattatgtggaactccagagtatttggctccagaaataattctcagcaagggctacaataaggcagtggattggtgggcattaggagtgctaatctatgaaatggcagctggctatcccccattctttgcagaccaaccaattcagatttatgaaaagattgtttctggaaaggtccgattcccatcccacttcagttcagatctcaaggaccttctacggaacctgctgcaggtggatttgaccaagagatttggaaatctaaagaatggtgtcagtgatataaaaactcacaagtggtttgccacgacagattggattgctatttaccagaggaaggttgaagctccattcataccaaagtttagaggctctggagataccagcaactttgatgactatgaagaagaagatatccgtgtctctataacagaaaaatgtgcaaaagaatttggtgaattttaaagaggaacaagatgacatctgagctcacactcagtgtttgcactctgttgagagataaggtagagctgagaccgtccttgttgaagcagttacctagttccttcattccaacgactgagtgaggtctttattgccatcatcccgtgtgcgcactctgcatccacctatgtaacaaggcaccgctaagcaagcattgtctgtgccataacacagtactagaccactttcttacttctctttgggttgtctttctcctctcctacatccatttcttccttttccaatttcattggttttctctaaacagtgctccattttattttgttggtgtttcagatgggcagtgttatggctacgtgatatttgaagggaaggataagtgttgctttcagtagttattgccaatattgttgttggtcaatggcttgaagataaactttctaataattattatttctttgagtagctcagacttggttttgccaaaactcttggtaatttttgaagatagactgtcttatcaccaaggaaatttatacaaattaagactaactttcttggaattcactattctggcaataaattttggtagactaatacagtacagctagacccagaaatttggaaggctgtagatcagaggttctagttccctttccctccttttatatcctcctctccttgagtaatgaagtgaccagcctgtgtagtgtgacaaacgtgtctcattcagcaggaaaaactaatgatatggatcatcacccagattctctcacttggtaccagcatttctgtaggtattagagaagagttctaagttttctaaaccttaactgttccttaaggattttagccagtattttaatagaacatgattaatgaaagtgacaaattttaaattttctctaatagtcctcatcataaactttttaaaggaaaataagcaaactaaaaagaacattggtttagataaatacttatactttgcaaagtcaaaaatggcttgatttttggaaacaatatagaggtattcatatttaaatgagggtttacatttgttttgttttgtaaccgttaaaaagaagttgtttccagctaattattgtggtgtactatatttgtgagcctagggtaggggcactgctgcaacttctgctttcatcccatgcctcatcaatgaggaaagggaacaaagtgtataaaactgccacaattgtattttaattttgaggtatgatattttcagatatttcataatttctaacctctgttctctcagtaaacagaatgtctgatcgatcatgcagatacaatgttggtatttgagaggttagtttttttcctacacttttttttgccaactgacttaacaacattgctgtcaggtggaaatttcaagcacttttgcacatttagttcagtgtttgttgagaatccatggcttaacccacttgttttgctatttttttctttgcttttaattttccccatctgattttatctctgcgtttcagtgacctaccttaaaacaacacacgagaagagttaaactgggttcattttaatgatcaatttacctgcatataaaatttatttttaatcaagctgatcttaatgtatataatcattctatttgctttattatcggtgcaggtaggtcattaacaccacttcttttcatctgtaccacaccctggtgaaacctttgaagacataaaaaaaacctgtctgagatgttctttctaccaatctatatgtctttcggttatcaagtgtttctgcatggtaatgtcatgtaaatgctgatattgatttcactggtccatctatatttaaaacgtgcaagaaaaaaataaaatactctgctctagcaagttttgtgtaacaaaggcatatcgtcatgttaataaatttaaaacatcattcgtataaaatattttaattttcttgtatttcatttagacccaagaacatgctgaccaatgtgttctatatgtaaactacaaattctatggtagctttgttgtatattattgtaaaattattttaataagtcatggggatgacaatttgattattacaatttagttttcagtaatcaaaaagatttctatgaattctaaaaaatatttttttctatgaaattactagtgcccagctgtagaatctaccttaggtagatgatccctagacatacgttggttttgagggctattcagccattccattttactctctatttaaaggccgtgagcaagcttgtcatgagcaaatatgtcaagggagtcaatttctgaccaatcaagtacactaaattagaatatttttaaagtatgtaacattcccagtttcagccacaatttagccaagaataagataaaaacttgaataagaagtaagtagcataaatcagtatttaacctaaaattacatatttgaaacagaagatattatgttatgctcagtaaataattaagagatggcattgtgtaagaaggagccctagactgaaagtcaagacatctgaatttcaggctggaaaactatcagtatgatctcagcctcagttctcttgtctgtaaaatggaagaactggattaggcagtttgtaagattcctcctaactttcacagtcgatgacaagattgtctttttatctgatattttgaagggtatattgctttgaagtaagtctcaataaggcaatatattttagggcatctttcttcttatctctgacagtgttcttaaaattatttgaatatcataagagccttggtgtctgtcctaattcctttctcactcaccgatgctgaatacccagttgaatcaaactgtcaacctaccaaaaacgatattgtggcttatgggtattgctgtctcattcttggtatattcttgtgttaactgcccattggcctgaaaatactcattgtaagcctgaaaaaaaaaatctttcccactgttttttctgcttgttgtaagaatcaaatgaaataatgtatgtgaaagcaccttgtaaactgtaacctatcaatgtaaaatgttaaggtgtgttgttatttcattaattacttctttgtttagaatggaatttcctatgcactactgtagctaggaaatgctgaaaacaactgtgttttttaattaatcaataactgcaaaattaaagtaccttcaatggataagacaaaa

SEQ ID NO: 74 - DNA, 3827 bp, Homo sapiens
  misc_feature: Template ID: 386989.40
caaactttggaaatgtgaaaaagtattactctaatcactgtcaatttatagacccctgactttctggaaataaaatgtgtaattaccttttactctgatcataatctcccacctgtctaagaggttatttattccttatttagagggcctctattgccatgtgcctggaattattatatgctcatcactttatgaagaataaaatttgtctttcctgccttaaagttacattcgttcttccgctcaaatcctgatctggtccattaaagagtgttcgcacaaagcgctgagggagctcggtacgccgccgcctcgcacccgcagcctcgcgcccgccgccgcccgtccccagagaaccatggagtctggcagtaccgccgccagtgaggaggcacgcagccttcgagaatgtgagctctacgtccagaagcataacattcaagcgctgctcaaagattctattgtgcagttgtgcactgctcgacctgagagacccatggcattcctcagggaatactttgagaggttggagaaggaggaggcaaaacagattcagaatctgcagaaagcaggcactcgtacagactcaagggaggatgagatttctcctcctccacccaacccagtggttaaaggtaggaggcgacgaggtgctatcagcgctgaggtctacacggaggaagatgcggcatcctatgttagaaaggttataccaaaagattacaagacaatggccgctttagccaaagccattgaaaagaatgtgctgttttcacatcttgatgataatgagagaagtgatatttttgatgccatgttttcggtctcctttatcgcaggagagactgtgattcagcaaggtgatgaaggggataacttctatgtgattgatcaaggagagacggatgtctatgttaacaatgaatgggcaaccagtgttggggaaggagggagctttggagaacttgctttgatttatggaacaccgagagcagccactgtcaaagcaaagacaaatgtgaaattgtggggcatcgaccgagacagctatagaagaatcctcatgggaagcacactgagaaagcggaagatgtatgaggaattccttagtaaagtctctattttagagtctctggacaagtgggaacgtcttacggtagctgatgcattggaaccagtgcagtttgaagatgggcagaagattgtggtgcagggagaaccaggggatgagttcttcattattttagaggggtcagctgctgtgctacaacgtcggtcagaaaatgaagagtttgttgaagtgggaagattggggccttctgattattttggtgaaattgcactactgatgaatcgtcctcgtgctgccacagttgttgctcgtggccccttgaagtgcgttaagctggaccgacctagatttgaacgtgttcttggcccatgctcagacatcctcaaacgaaacatccagcagtacaacagttttgtgtcactgtctgtctgaaatctgcctcctgtgcctcccttttctcctctccccaatccatgcttcactcatgcaaactgctttattttccctacttgcagcgccaagtggccactggcatcgcagcttcctgtctgtttatatattgaaagttgcttttattgcaccattttcaatttggagcattaactaaatgctcatacacagttaaataaatagaaagagttctatggagactttgctgttactgcttctctttgtgcagtgttagtattcaccctggggcagtgagtgccatgctttttggtgagggcagatcccagcacctattgaattaccatagagtaatgatgtaacagtgcaagattttttttttaagtgacataattgtccagttataagcgtatttagactgtggccatatatgctgtatttctttgtagaataaatggtttctcattaaactctaaagattagggaaaatggatatagaaaatcttagtatagtagaaagacatctgcctgtaattaaactagtttaagggtggaaaaatgcccatttttgctaattatcaatgggatatgattggttcagtttttttttttccagagttgttgtttgccaagctaatctgcctggttttatttatatcttgttattaatgtttcttctccaattctgaaatacttttgagtatggctatctatacctgccttttaagtttgaaactaactcatagattgcaaatattggttagtatttaactacatctgcctcggctcacaaattccgattagacctttatccagctagtgccaaataattgatcagatgctgaattgagaataagaatttgaggtctacattcttggttgttaatttagagcgtttggttaaagtatgtccttcagctgactccagtataatctcctctgctcattaaactgattccaggagattggatttgctgtgactagatacagatggagcaaatgtcctaacagagaaatagaggtgatgctgctaaagggagaaatgccaggcggacaaagttcagtgtcgggaattttccccgtgacattcactggggcatgagattttggaagaagttttttactttggtttagtctttttttccttcctttttattcagctagaatttctggtgggttgatggtagggtataatgtgtctgtgttgcttcaaattggtctgaaaggctatcctgctgaaagtcctgctttcctatctagcatttatttctctggcaaacttttctttcttttcttttttaaagtaaacttgtgtattgagtcttaactgtatttcagtattttccagccttatgtgttacattattccaatgatacccaacagtttatttttattatttttttaaacaaaatttcacagttctgtaatgtaggcacttttattttcattgtgatttatatataaggtaatgtagggttatatttgggagtgactgcaagcatttttccatctgtgtgcaactaactgactctgttattgatcccttctcctgccctttcccaggtaatttaaattggtcatggtagatttttttcatagatttgaaaaacttttaggttgttaccaagtatgaagtataaatctggggaagaggttttatttacattttagggtgggtaagaaagccaccttgttacaaattttttaatttccaaaataatctatattaaatgagggtttctgatctgtactttgtgtttagctacctttttatatttaaaaaattaaaaatgaaaattatgttcttacaagcttaaagcttgatttgatctttgtttaaatgccaaaatgtacttaaatgagttacttagaatgccataaaattgcagtttcatgtatgtatataatcatgctcatgtatatttagttacgtataatgctttctgagtgagttttactcttaaatcatttggttaaatcatttggcttgctgtttactcccttctgtagtttttaattaaaaactttaaagataagtctacattaaacaatgatcacatctaaagctttatctttgtgtaatctaagtatatgtgagaaatcagaattggcataatttgtcttagttgatattcaaggctttaaaagtcattattcctgggcttggtaagtgaatttatgagatttactgctctagaaagtatagatggccaaaggaccgttttgtattgcttcctgattaccagtctgattataccatgtgtgctaatatactttttttgttatagattgtcttaatggtaggtcaagtaataaaaagagatgaaataatttaaattcttaaaa

SEQ ID NO: 75 - DNA, 5195 bp, Homo sapiens
  misc_feature: Template ID: 434608.8
  unsure 4856, 4859, 4880, 4884, 4891, 4894, 4909, 4912, 4914, 4921, 4940, 4947,4954, 4996, 5011, 5021, 5023, 5073, 5105, 5122: a, t, c, g, or other
catgcagctagcaagtggtttgttcttagggtaacagaggaggaaattgttcctcgtctgataagacaacagtggagaaaggacgcatgctgtttcttagggacacggctgacttccagatatgaccatgtatttgtggcttaaactcttggcatttggctttgcctttctggacacagaagtatttgtgacagggcaaagcccaacaccttcccccactgatgcctaccttaatgcctctgaaacaaccactctgagcccttctggaagcgctgtcatttcaaccacaacaatagctactactccatctaagccaacatgtgatgaaaaatatgcaaacatcactgtggattacttatataacaaggaaactaaattatttacagcaaagctaaatgttaatgagaatgtggaatgtggaaacaatacttgcacaaacaatgaggtgcataaccttacagaatgtaaaaatgcgtctgtttccatatctcataattcatgtactgctcctgataagacattaatattagatgtgccaccaggggttgaaaagtttcagttacatgattgtacacaagttgaaaaagcagatactactatttgtttaaaatggaaaaatattgaaacctttacttgtgatacacagaatattacctacagatttcagtgtggtaatatgatatttgataataaagaaattaaattagaaaaccttgaacccgaacatgagtataagtgtgactcagaaatactctataataaccacaagtttactaacgcaagtaaaattattaaaacagattttgggagtccaggagagcctcagattattttttgtagaagtgaagctgcacatcaaggagtaattacctggaatccccctcaaagatcatttcataattttaccctctgttatataaaagagacagaaaaagattgcctcaatctggataaaaacctgatcaaatatgatttgcaaaatttaaaaccttatacgaaatatgttttatcattacatgcctacatcattgcaaaagtgcaacgtaatggaagtgctgcaatgtgtcatttcacaactaaaagtgctcctccaagccaggtctggaacatgactgtctccatgacatcagataatagtatgcatgtcaagtgtaggcctcccagggaccgtaatggcccccatgaacgttaccatttggaagttgaagctggaaatactctggttagaaatgagtcgcataagaattgcgatttccgtgtaaaagatcttcaatattcaacagactacacttttaaggcctattttcacaatggagactatcctggagaaccctttattttacatcattcaacatcttataattctaaggcactgatagcatttctggcatttctgattattgtgacatcaatagccctgcttgttgttctctacaaaatctatgatctacataagaaaagatcctgcaatttagatgaacagcaggagcttgttgaaagggatgatgaaaaacaactgatgaatgtggagccaatccatgcagatattttgttggaaacttataagaggaagattgctgatgaaggaagactttttctggctgaatttcagagcatcccgcgggtgttcagcaagtttcctataaaggaagctcgaaagccctttaaccagaataaaaaccgttatgttgacattcttccttatgattataaccgtgttgaactctctgagataaacggagatgcagggtcaaactacataaatgccagctatattgatggtttcaaagaacccaggaaatacattgctgcacaaggtcccagggatgaaactgttgatgatttctggaggatgatttgggaacagaaagccacagttattgtcatggtcactcgatgtgaagaaggaaacaggaacaagtgtgcagaatactggccgtcaatggaagagggcactcgggcttttggagatgttgttgtaaagatcaaccagcacaaaagatgtccagattacatcattcagaaattgaacattgtaaataaaaaagaaaaagcaactggaagagaggtgactcacattcagttcaccagctggccagaccacggggtgcctgaggatcctcacttgctcctcaaactgagaaggagagtgaatgccttcagcaatttcttcagtggtcccattgtggtgcactgcagtgctggtgttgggcgcacaggaacctatatcggaattgatgccatgctagaaggcctggaagccgagaacaaagtggatgtttatggttatgttgtcaagctaaggcgacagagatgcctgatggttcaagtagaggcccagtacatcttgatccatcaggctttggtggaatacaatcagtttggagaaacagaagtgaatttgtctgaattacatccatatctacataacatgaagaaaagggatccacccagtgagccgtctccactagaggctgaattccagagacttccttcatataggagctggaggacacagcacattggaaatcaagaagaaaataaaagtaaaaacaggaattctaatgtcatcccatatgactataacagagtgccacttaaacatgagctggaaatgagtaaagagagtgagcatgattcagatgaatcctctgatgatgacagtgattcagaggaaccaagcaaatacatcaatgcatcttttataatgagctactggaaacctgaagtgatgattgctgctcagggaccactgaaggagaccattggtgacttttggcagatgatcttccaaagaaaagtcaaagttattgttatgctgacagaactgaaacatggagaccaggaaatctgtgctcagtactggggagaaggaaagcaaacatatggagatattgaagttgacctgaaagacacagacaaatcttcaacttatacccttcgtgtctttgaactgagacattccaagaggaaagactctcgaactgtgtaccagtaccaatatacaaactggagtgtggagcagcttcctgcagaacccaaggaattaatctctatgattcaggtcgtcaaacaaaaacttccccagaagaattcctctgaagggaacaagcatcacaagagtacacctctactcattcactgcagggatggatctcagcaaacgggaatattttgtgctttgttaaatctcttagaaagtgcggaaacagaagaggtagtggatatttttcaagtggtaaaagctctacgcaaagctaggccaggcatggtttccacattcgagcaatatcaattcctatatgacgtcattgccagcacctaccctgctcagaatggacaagtaaagaaaaacaaccatcaagaagataaaattgaatttgataatgaagtggacaaagtaaagcaggatgctaattgtgttaatccacttggtgccccagaaaagctccctgaagcaaaggaacaggctgaaggttctgaacccacgagtggcactgaggggccagaacattctgtcaatggtcctgcaagtccagctttaaatcaaggttcataggaaaagacataaatgaggaaactccaaacctcctgttagctgttatttctatttttgtagaagtaggaagtgaaaataggtatacagtggattaattaaatgcagcgaaccaatatttgtagaagggttatattttactactgtggaaaaatatttaagatagttttgccagaacagtttgtacagacgtatgcttattttaaaattttatctcttattcagtaaaaaacaacttctttgtaatcgttatgtgtgtatatgtatgtgtgtatgggtgtgtgtttgtgtgagagacagagaaagagagagaattctttcaagtgaatctaaaagcttttgcttttcctttgtttttatgaagaaaaaatacattttatattagaagtgttaacttagcttgaaggatctgtttttaaaaatcataaactgtgtgcagactcaataaaatcatgtacatttctgaaatgacctcaagatgtcctccttgttctactcatatatatctatcttatatagtttactattttacttctagagatagtacataaaggtggtatgtgtgtgtatgctactacaaaaaagttgttaactaaattaacattgggaaatcttatattccatatattagcatttagtccaatgtctttttaagcttatttaattaaaaaatttccagtgagcttatcatgctgtctttacatggggttttcaattttgcatgctcgattattccctgtacaatatttaaaatttattgcttgatacttttgacaacaaattaggttttgtacaattgaacttaaataaatgtcattaaaataaataaatgcaatatgtattaatattcattgtataaaaatagaagaatacaaacatatttgttaaatatttacatatgaaatttaatatagctatttttatggaatttttcattgatatgaaaaatatgatattgcatatgcatagttcccatgttaaatcccattcataactttcattaaagcatttactttgaatttctccaatgcttagaatgtttttaccaggaatggatgtcgctaatcataataaaattcaaccattatttttttcttgtttataatacattgtgttatatgttcaaatatgaaatgtgtatgcacctattgaaatatgtttaatgcatttattaacatttgcaggacacttttacaggccccaattatccaatagtctaataattgtttaagatctagaaaaaaaaaaatcaagaatagtggtatttttcatgaagtaataaaaactcgttttggtgaantcngtaatagcttatcatgaaggncaancacaacnttnagattggttgggttntcnanatcttanctctttagtctgattttanaggtctnaactatncagcaccgattattgtccattcaactcacatttattttgtgnccctacttctaattntttcactatngnaacatataaaattaacaattaacccttatagtagtatatagacccttgtncttatttaacagatgaaaagaagtaaattttncaatgaagccacagttnctaatttatattaaggttacttattacatctttacttattaatgagaaaaggggattagaatcaccaattatg

SEQ ID NO: 76 - DNA, 1592 bp, Homo sapiens
  misc_feature: Template ID: 891141.5
cggactgcggagaacaatatcctcctccctaacagataaacagcccttgttcctcgggataaggactggcagtcccctgacaccctaagaccggcatctgtcgatgttatttccccagcatggccgaaacagaagccctgtcgaagcttcgggaagacttcaggatgcagaataaatccgtctttattttgggcgccagcggagaaaccggcagagtgctcttaaaggaaatcctggagcagggcctgttttccaaagtcacgctcattggccggaggaagctcaccttcgacgaggaagcttataaaaatgtgaatcaagaagtggtggactttgaaaagttggatgactacgcctctgcctttcaaggtcatgatgttggattctgttgcctgggtaccaccagagggaaagctggggcggagggatttgttcgtgttgaccgagattatgtgctgaagtctgcagagctggcaaaagctggagggtgcaaacatttcaacttgctatcctctaaaggagctgataaatcaagcaattttttatatctacaagttaagggagaagtagaagccaaggttgaagaattaaaatttgatcgttactctgtatttaggcctggagttctgttatgtgataggcaagaatctcgcccaggtgaatggctggttagaaagttctttggctccttaccagactcttgggccagtgggcattctgtgcctgtggtgaccgtggttagagcaatgctgaacaatgtggtgagaccaagagacaagcagatggaactgctggagaacaaggccatccatgacctggggaaagcgcatggctctctcaagccatgaccacactggagaaatggtttttattgtcaaccttaacacccatcaccaaatcggtaatttcagggtctaaaaaaagtcagcatgttttaactttgttgttttactatcctcaggcatccattccaatcaagaaatgatggtgctctgcatcagtggttcagagcctggttatacatatagatcactcagggagctttggaaaaataaagatttgtcagccctatctcaaacttgaatcaaaatttctggggtgtgggcacaataatctgtaattttctttgtttatacttcccctgatgccactggttccgatgccactggctggggggcctgctttgaaatgcttgtctgcagagtcacagcagccatgaaaaccttatgaccgtgcaaatgagctctgctctaaaattgttgacattcatgtctctgagttacaaaagtgctaattcactacatgtaattgtgtaagtaaacattgtgcctttactacttctttatgtaatagaagttatatacctaagcttatataatacatggggaggattaaataaaggaataaagatgaatggacaactcctgggtgcctcttagattgcttgaaaatgcccatgtagtgtgatatgcagcatttcagcctatggggtgatataatagcagctaatatttaccaaatgcttgctaagtaccagtctttacatgtgttatctgtgctttaaccctcttataaacgatctttattaagtg

SEQ ID NO: 77 - DNA, 1203 bp, Homo sapiens
  misc_feature: Template ID: 233653.13
attacggcgcagtgtgctggcaagcgcccttgctcgccgccgcgcgccgcctcgcggcctggccccgccgcgcccggcgcgcccgccgcccggggggatgtcttacaaaccgaacttggccgcgcacatgcccgccgccgccctcaacgccgctgggagtgtccactcgccttccaccagcatggcaacgtcttcacagtaccgccagctgctcagtgactacgggccaccgtccctaggctacacccagggaactgggaacagccaggtgccccaaagcaaatacgcggagctgctggccatcattgaagagctggggaaggagatcagacccacgtacgcagggagcaagagtgccatggagaggctgaagcgcggcatcattcacgctagaggactggttcgggagtgcttggcagaaacggaacggaatgccagatcctagctgccttgttggttttgaaggatttccatctttttacaagatgagaagttacagttcatctcccctgttcagatgaaacccttgttttcaaaatggttacagtttcgtttttcctcccatggttcacttggctctgaacctacagtctcaaagattgagaaaagattttgcagttaattaggatttgcattttaagtagttaggaactgcccaggttttttttgttttttaagcattgatttaaaagatgcacggaaagttatcttacagcaaactgtagtttgcctccaagacaccattgtctccctttaatcttctcttttgtatacatttgttacccatggtgttctttgttccttttcataagctaataccactgtagggattttgttttgaacgcatattgacagcacgctttacttagtagccggttcccatttgccatacaatgtaggttctgcttaatgtaacttcttttttgcttaagcatttgcatgactattagtgcttcaaagtcaatttttaaaaatgcacaagttataaatacagaagaaagagcaacccaccaaacctaacaaggacccccgaacactttcatactaagactgtaagtagatctcagttctgcgtttattgtaagttgataaaaacatctggaagaaaatgactaaaactgtttgcatctttgtatgtatttattacttgatgtaataaagcttattttcattaacaatttgtattaaaatgtgggttccttg

SEQ ID NO: 78 - DNA, 4654 bp, Homo sapiens
  misc_feature: Template ID: 253405.7
  unsure 78: a, t, c, g, or other
gggatctgtgaaagaagctcggtggatcccacccctttcctccagagcttccctttcctgtccttatttgcacccgcnccccgcccgcgtcggtctggggcttttgacttctccccgaacacatttcccctcccgtcgctgggtccctgcgatcgcccccagctggtggggctcgcggagctcaggggagcggggtcctctgcgccgctgcagcgcgagttaataaacagttaagtttggaagactctgcagacacgttgagggggagttaccaagcccaggcagcaaaaacatcctggcacattcctggggagtcctcagctgccagcatctgattagaaccatatctctcgccgggagtggccgcgcggctccgaagctcccggccggcggctatttaagcgaggcccgccgcatccgctgcgctgtagcctggaggctccgggcgcgggggaagtcatgctcgcttcacggaggcaatagctagccggtgtctgtgggaggttatgtttatttgagacttctccatcgggatcgcctggtgtcaccaagtgtccactggtactgaggtttgctgcctgccttcttgccatgtctaacgaagtagaaacaagtgcaaccaatggtcagcccgaccaacaggccgcaccaaaagcaccctcaaagaaggaaaaaaagaaaggccctgaaaagacagatgaatatctcttagcaaggttcaaaggcgatggtgtaaaatataaggccaagctgattggcattgatgatgtgccagatgcaagaggggataaaatgagccaagactctatgatgaaactaaagggaatggcggcagctggtcggtctcagggacaacacaaacaaaggatctgggtcaacatttccctttctgggataaaaataattgatgagaaaactggggtaatagagcatgaacatccagtaaataagatttctttcattgcccgtgatgtgacagacaaccgggcatttggttacgtgtgtggaggagaaggccagcatcagttttttgccataaaaaccgggcaacaggctgaaccattagttgttgatcttaaagacctttttcaagttatctataatgtaaagaaaaaggaagaagaaaagaaaaagatagaggaagccagcaaagcagttgagaatgggagtgaggccctaatgattctagatgaccaaactaacaaactgaaatcgggtgttgaccagatggatttgtttggggacatgtctacacctcctgacctaaatagtccaacagaaagcaaagatatcctgttagtggatctaaactctgaaatcgacaccaatcagaattctttaagagaaaatccattcttaacaaacggcatcacctcctgttctcttcctcgaccaacgcctcaggcatccttcttgcctgaaaatgccttttctgccaatctcaacttctttcccacccctaatcctgatcctttccgtgacgatcctttcacacagccagaccaatcgacaccttcttcgtttgattctctcaaatctccagatcagaagaaagagaattcgagtagctcgtctactccgctgagtaatgggcccctgaatggtgatgttgactactttggtcagcaatttgaccagatctctaaccggactggcaaacaggaagctcaggcaggcccatggcccttttcaagttcgcaaacccagccagcagtgagaactcaaaatggggtatctgaaagagaacagaacggcttctctgtcaaatcctccccgaacccttttgtgggaagccctcccaaaggactgtccatacagaatggcgtaaagcaggacttggaaagctctgtccagtcctcaccacatgactccatagccattatcccacctccacaaagtaccaaaccaggaagaggcagaaggactgctaagtcttcagccaatgacttgcttgcatcagacatctttgctcctcccgtctcagaaccttcaggccaggcgtcacccacaggacaacctacagccctgcagcccaaccctctggatctcttcaaaacaagtgctcctgccccagtggggcccctggtgggtctaggtggtgtaactgtcacactccctcaggcaggaccatggaacacagcatctttggtcttcaatcagtccccttcaatggctccgggagccatgatgggtggtcaaccttcaggttttagtcagcccgtcatttttggtacaagtccagctgtttcaggttggaaccagccttcaccctttgcagcctcaactccccctccagtgcctgttgtctggggcccttctgcatctgtggcacccaatgcttggtcaacaacaagccctttggggaatccttttcagagcaatatttttccagctcctgctgtgtccactcagcccccatccatgcactcctctctcctggtcactcctcctcagccacctgcccagagctggccctcccaaggacatctccagtgatgccttcactgccttagacccacttggggataaagagatcaaggatgtgaaagaaatgtttaaggatttccaactgcggcagccacctgctgtgcccgcgcggaagggagagcagacttcttctggtactttgagtgcctttgctagttatttcaacagcaaggttggcattcctcaggagaatgcagaccatgatgactttgatgctaatcaactattgaacaagatcaatgaaccaccaaagccagctcccagacaagtttccctgccagttaccaaatctactgacaatgcatttgagaaccctttctttaaagattcttttggttcatcacaagcctctgtggcttcttctcaacctgtatcttctgagatgtatagggatccatttggaaatccttttgcctaaattctgaacttggtctgcagaccatccagaggaataaaaaggttggccttagtagtcaaaaacaaagctgatagccagacacgttctgatttctgcccttgttccagctttgacgtattatctgttgccttatttctcattgcctcttctacttgtaaaatgcttttcactttctgtctaggttaaagctaaactgaatctatggctttaaataaattaagatcctaaactctctagcttaagtgtaaatgaagtacagtagtttccctactgaaccctgcctcttgtgtccctggaaccttctagaacacctgccttctaccctctggttgggagatgcagccaccacatcccttcatatcatactgttttgaataaattttcaaatccttattgttcagagttgtttgggggttctgtttcagagcataaaacctaaaggttatagtagaacaaggcaccttcttaaaagaaatcttgcttcagaccatcagttacagagaatttctaaagtaaaattgaagcaactacaacttctccttagacactttggaatctaaccacttaaggacctttttaaagagatagcttctcttctttctgaagatcaatttctcccaaggccaagattgtccttttctcccatttcttgctagctattgcaaatgagggaagaacattattcatctctcctccccttttttttctgattcttttttcagtcagttttgctcctgggttcaagtagtattaccaccctttcacaagcaacagactctcacagggcaaaaaaaaaaaaaatctaatgattcacagacagatctggagcctctcttcattctcagtaattgctagtcccaagaactagaattgcaaatgggcacaacctatatccttcctgtggaagaggaggccactctcttgagctgaagttccagaagagcagttaatgttcaagagaaattgaactcaactcagcaacaaaggactctattttgaagagcaacatatcacaaagctaaatgtgattgtgccaaacacattaggtgcttatttggggtcatgctaggcctttatcaagtaactggaaaacttttcttgcagccacaatctcaatgtcgttagtaggaagataagaggggagaaaaagctgtagaacaaatgtttggggttaccattgaaaatctaatgtctgcaatatttttctcctcacaacttggaaacgttcccagttcattttcagtcctgttgtgagcacagttctgaagggtttattattgtcaaaataagttttgttttgttttgtttatgttgggtttttaatgttgtctcttgacccttaatgctcaggttcttgtgggagttaatcagccacatccaacgttaccttgagggggaagaagagggtgatgctcagaagctaaacaagacaggggccacatgaccctctattgattagccccaagtagaaagtcctgtggttttatgtttaatggtaatagttgatcatatatggcataattttctatcagcttcctactcagtcactataaacacagacttgaaatagtactttaaatgtccaaatacctaaatgtgctaaactggaggtaactatttctaggtagttgaatttttgaaagtcatgatcagccacacaactgttttgtacatacttattttctcatgcacttttctgtatgcaaataaagctataaatttactcatttcaataaactggagtggcag

SEQ ID NO: 79 - DNA, 2682 bp, Homo sapiens
  misc_feature: Template ID: 197600.12
  unsure 2276-2470: a, t, c, g, or other
ggagcgtggaaatggcggctgtagccgagggggcggccggaaagcagcggcggcgtctggggcgctttcgcaacattcagacctcggttgcagcccggtgccgtgagctgaagaggtttcacatcttactccgccccacaccctggggcgttgcggcgctgggctcgttgctgcagccggaccctgctcgatgggcacgactgggctggagagtctgagtctgggggaccgcggagctgcccccaccgtcacctctagtgagcgcctagtcccagacccgccgaatgacctccgcaaagaagatgttgctatggaattggaaagagtgggagaagatgaggaacaaatgatgataaaaagaagcagtgaatgtaatcccttgctacaagaacccatcgcttctgctcagtttggtgctactgcaggaacagaatgccgtaagtctgtcccatgtggatgggaaagagttgtgaagcaaaggttatttgggaagacagcaggaagatttgatgtgtactttatcagcccacaaggactgaagttcagatccaaaagttcacttgctaattatcttcacaaaaatggagagacttctcttaagccagaagattttgattttactgtactttctaaaaggggtatcaagtcaagatataaagactgcagcatggcagccctgacatcccatctacaaaaccaaagtaacaattcaaactggaacctcaggacccgaagcaagtgcaaaaaggatgtgtttatgccgccaagtagtagttcagagttgcaggagagcagaggactctctaactttacttccactcatttgcttttgaaagaagatgagggtgttgatgatgttaacttcagaaaggttagaaagcccaaaggaaaggtgactattttgaaaggaatcccaattaagaaaactaaaaaaggatgtaggaagagctgttcaggttttgttcaaagtgatagcaaaagagaatctgtgtgtaataaagcagatgctgaaagtgaacctgttgcacaaaaaagtcagcttgatagaactgtctgcatttctgatgctggagcatgtggtgagaccctcagtgtgaccagtgaagaaaacagccttgtaaaaaaaaaagaaagatcattgagttcaggatcaaatttttgttctgaacaaaaaacttctggcatcataaacaaattttgttcagccaaagactcagaacacaacgagaagtatgaggatacctttttagaatctgaagaaatcggaacaaaagtagaagttgtggaaaggaaagaacatttgcatactgacattttaaaacgtggctctgaaatggacaacaactgctcaccaaccaggaaagacttcactggtgagaaaatatttcaagaagataccatcccacgaacacagatagaaagaaggaaaacaagcctgtatttttccagcaaatataacaaagaagctcttagccccccacgacgtaaagcctttaagaaatggacacctcctcggtcaccttttaatctcgttcaagaaacactttttcatgatccatggaagcttctcatcgctactatatttctcaatcggacctcaggcaaaatggcaatacctgtgctttggaagtttctggagaagtatccttcagctgaggtagcaagaaccgcagactggagagatgtgtcagaacttcttaaacctcttggtctctacgatcttcgggcaaaaaccattgtcaagttctcagatgaatacctgacaaagcagtggaagtatccaattgagcttcatgggattggtaaatatggcaacgactcttaccgaattttttgtgtcaatgagtggaagcaggtgcaccctgaagaccacaaattaaataaatatcatgactggctttgggaaaatcatgaaaaattaagtctatcttaaactctgcagctttcaagctcatctgttatgcatagctttgcacttcaaaaaagcttaattaagtacaaccaaccacctttccagccatagagattttaattagcccaactagaagcctagtgtgtgtgctttcttaatgtgtgtgccaatggtggatctttgctactgaatgtgtttgaacatgttttgagatttttttaaaataaattattatttgacaacaatccaaaaaaaatacggcttttccaatgatgaaatataatcagaagatgaaaaatagttctaaactatcaataatacaaagcaaatttctatcagccttgctaaagctaggggcccactnnnnnnnnnnnnnnnnnnnnnnnnnnnnnnnnnnnnnnnnnnnnnnnnnnnnnnnnnnnnnnnnnnnnnnnnnnnnnnnnnnnnnnnnnnnnnnnnnnnnnnnnnnnnnnnnnnnnnnnnnnnnnnnnnnnnnnnnnnnnnnnnnnnnnnnnnnnnnnnnnnnnnnnnnnnnnnnnnnnnnnnnnnnnnnnnnnngctgaccccaaagacaaataagattcctctggcattgtgtattgttgacagctccacactagctcttaggaattgtagattccaccccagtatccatttgataacctaatgtgaatatgggcctgctgctccatttcagctcactcactcttttaccttggtccctttgtgaaaactcatttctcatcttccatttggagtttataccattt

SEQ ID NO: 80 - DNA, 2565 bp, Homo sapiens
  misc_feature: Template ID: 1078199.1
  unsure 438, 452, 461, 1183-1184: a, t, c, g, or other
ggcggggcctttgtctctcgctgcagccggcgctccacgtctagtcttcactgctctgcgtcctgtgctgataaaggctcgccgctgtgaccctgttacctgcaagaacttggaggttcacagctaagacgccaggaccccctggaagcctagaaatgttatgtgttctcattttgcccaagatgtttggccagagcacagcataaaagattctttccaaaaagtgatactgagaacatatggaaaatatggacatgagaatttacagctaagaaaagaccataaaagtgtggatgcatgtaaggtgtacaaaggaggttataatggacttaaccagtgtttgacaactactgacagcaagatatttcagtgtgataaatatgtgaaagtcttcataaatttccaaatgtaaatagaaataagataagacatactggnaagacacctttcanatgtaaaanccgtggcaaatcattttgcatgctttcacaattaactcaacataagataattcatactggagataaaccctacaaatgtgaagaatgtggcaaagcatttctatggtcctcaaccctgaataaacatgagaaaattcatactggagagaaaccctacaaatgtaaggaatgtggcaaagtcatttcctcatcctcaagctttgctacacataagaggattcatactggagagaaaccctacaaatgtgaagaatgtggcaaagcctttaactggttccacaacccttactctacattagataattcatgcgggagagaaaccctacaaatgtgatgaatgtggcaaagcctttaaccagtgttcaaacctcactaaacataagagaattcatactggagagaaaccctacaaatgtgaagaatgtggcaaagcttttaaccggtgctcacaccttactgaacataaaagaattcatactggagagaagccctataaatgtgaagaatgtggtaaagtctttatatcttgttcaagcctttcaaaccataagagaattcatacaagagagaaatcctacaaatctgaggaatgtggcaaatcctataaccactgctcagacctcaatgtacctgagaaaattcatacctgagaaaaatcctacaaatgtaaaaaatgtggcaaagcctttaataggtccacatcacttagtaaacataagagnntcatactggagagaaaccctacaaatgtgaagaatgtgacaaagcctttaaccagtcctcaatttttactaaacataagaaaattcatactggagagaaaccctatgattgtgaaaaatatggcaaaggctttaactagtcctcagttcttaacacacatacgataattcttactgcagagaaactctacaaaccagtaagatgtgacagtgcttctgacaacatctcaaacttttctaatcataaaagaaatcatattggtgagaaatcctagaaatgtggagaatgtaacaaagtatttaaatggttgtcacacttgattataggtaatattcatattggaaaaatttcctacaagtaagaacaatgtggcaaagtttttaactaatacaccttattgcacagaaaatcatttatatttgagaaaaattgtagaaatatagactgtgaaaaagacgtcaatatctgctcacatcttactaaacaccagagagttcatgcttaataaaagcatgataagtgcaattactgccaaaagatctttcagaaaatattatcctttaaagtgaaggagagtatttatattaaagatgaacattacaaccataaagagggttgaagtacctttacttgtatcagatcttattgtccacattttgtactacagaaaaactctgaagaggtcactcaaactttgttcaacatcagggaatttatattggagagctgtcttgcaaatgtaataaatttgggaaaacaaattttcaaaaactacagcttagaaaacaccagagtttatacgaaaatatattttcaaaggtgtagtaaaaataaaaaaaattttaatccaaatttgtctatgtaaataccagaatttatagtagaaatatatgaggaagcgacacttcgaatattctactaaatgagagttctgagtatagaaaataaaactaaagttggtagaaaaattatttgtatataatgttaagaggagtaaaagattttttgtagaataataactatattcagattatactttgtttcttgaaaaaattacagattttttgaaaagcaaatgatgtaactcaactcattattttctgctgtttcttcattcttattcacttgtgaaagcttgtgatcatttgttgctgcatcagaggtatgagagattcttcttcattagatgggcattatttatgatcttttctatggatgagtaagaatattaaaatgtaagatgcatggtgaaaatctaagtggagaggttctttgtggttaacttatactattgagtgatgcacaaggtaggtgttaagagtaatattcttttgcattatgagaaaactagtatattattcatatattttactaattgtac

SEQ ID NO: 81 - DNA, 334 bp, Homo sapiens
  misc_feature: Template ID: 025138.1
gtggaaactataaggaaggccagaagaaatataaaattggagattaattggggtgcaggaaagttatggaaagaatataagtcctgctagataaatcattagctattttaataaagaatacagaagaaaataggaacaaaagaatatatactggaataattttgagagtaatttgaagaattagatgcaaataaatttgaaaacctttaaaaagaaaccaatggcctaactgacccaagaagggaaagaaaatctaaacagactgataaatacaaaatgaaattcagacacttacagagcagccaggcatggtggctcacacctgtaatcctgt

SEQ ID NO: 82 - DNA, 1520 bp, Homo sapiens
  misc_feature: Template ID: 1000222.1
gttctagatcggtagcgggagcggagagcggaccccagagagccctgagcagccccaccgccgccgccggcctagttaccatcacaccccggtgaggagccgcagctgccgcagccggccccagtcaccatcaccgcaaccatgagcagcgaggccgagacccagcagccccaccgccgccccccccgccgcccccgccctcagcgccgccgacaccaagcccggcactacgggcagcggcgcagggagcggtggcccgggcggcctcacatcggcggcgcctgccggcggggacaagaaggtcatcgcaacgaaggttttgggaacagtaaaatggttcaatgtaaggaacggatatggtttcatcaacaggaatgacaccaaggaagatgtatttgtacaccagactgccataaagaagaataaccccaggaagtaccttcgcagtgtaggagatggagagactgtggagtttgatgttgttgaaggagaaaagggtgcggaggcagcaaatgttacaggtcctggtggtgttccagttcaaggcagtaaatatgcagcagaccgtaaccattatagacgctatccacgtcgtaggggtcctccacgcaattaccagcaaaattaccagaatagtgagagtggggaaaagaacgagggatcggagagtgctcccgaaggccaggcccaacaacgccggccctaccgcaggcgaaggttcccaccttactacatgcggagaccctatgggcgtcgaccacagtattccaaccctcctgtgcagggagaagtgatggagggtgctgacaaccagggtgcaggagaacaaggtagaccagtgaggcagaatatgtatcggggatatagaccacgattccgcaggggccctcctcgccaaagacagcctagagaggacggcaatgaagaagataaagaaaatcaaggagatgagacccaaggtcagcagccacctcaacgtcggtaccgccgcaacttcaattaccgacgcagacgcccagaaaaccctaaaccacaagatggcaaagagacaaaagcagccgatccaccagctgagaattcgtccgctcccgaggctgagcagggcggggctgagtaaatgccggcttaccatctctaccatcatccggtttagtcatccaacaagaagaaatatgaaattccagcaataagaaatgaacaaaagattggagctgaagacctaaagtgcttgctttttgcccgttgaccagataaatagaactatctgcattatctatgcagcatggggtttttattatttttacctaaagacgtctctttttggtaataacaaacgtgttttttaaaaaagcctggtttttctcaatacgcctttaaaggtttttaaattgtttcatatctggtcaagttgagatttttaagaacttcatttttaatttgtaataaaagtttacaacttgattttttcaaaaaagtcaacaaactgcaagcacctgttaataaaggtcttaaataattga

SEQ ID NO: 83 - DNA, 3382 bp, Homo sapiens
  misc_feature: Template ID: 1079467.1
tttggtctttgtccgcgggtcagtacggcccctgggtccacgtggcgcgaaagtaggaggaagacataggccaaggagccagacttcctgtgttaactccttcctctgccactttttaccttggggacctcagttaatatgatcctctgttgaagcaagaagacaaactgtatggtggagaaagaagtgggaaggatctgcgcggaagaagcctgagaagatgatgcacagatagagaggcaccaggacttgagaggcaccaggacttgggaggcatgttgatccatctccaggaaagactgagaaaaagagcgttgaatataagaaaaaatacttcctctgttctcagatcgtatttgttttaaggccacacctttttgaagttttcagtttgaaacacaacctggactgaaatcatgagggaggttgtgtaggaaagaatcatcaagggacttagttgggagcttctctaccacagcttactccttatggtattaaccccctttaagtgtaaatgtctttggtttaaaacgtttgtacctcatctgttaccagagtgttcatactggagagaaaccctatgaatttactgaatgtgggggaactgttactcatatgttgcatttcgtcgaacgtgcaagtcatgctgaagagaaaccctgtgcttctaaggagtattgacaagcccttagctagatgacaatctcattgagaagcagaaaattcatgctggagagaaactagtgaaggtagcaatacttcattgaatattagaaaatttttctagagagaaagcattgaatatactgagtatgataacatttcctctcaaaccttatcccttactctgcatttgggagatcatacacagagaagccttataaatgtaagagatgtggaaatatcttcagccaaaagtaaatcctcactcatcaagaaatttttactggagagaaaccttgtgaatgtgggaaagcttccattcagatgtcacacctcagccagcagagaatttacagtggggaaaacccctttgcctgtaaggtatgtggaaaagtcttcagccacaaatcaaacctcactgagcatgagcattttcacacgagagagaaaccttttgaatgtaacgagtgtggaaaagcctttagccaaaagcagtatgtcattaaacatcagaacacccatactggcgagaagcttttcgaatgtaatgaatgtggaaaatcatttagccagaaggaaaacctccttacgcaccagaaaattcacactggagaaaaaccttttgagtgtaaagattgcgggaaagctttcattcagaagtcaaacctcatcagacaccagagaactcacacaggagagaagccctttgtatgtaaggaatgtggaaaaaccttcagtggcaaatccaaccttactgagcatgagaaaatccatattggagagaagccttttaaatgtagtgaatgtggaacagcctttggccagaagaagtacctcataaaacatcagaacattcacactggagagaaaccctatgaatgtaacgaatgtggaaaagccttctctcagcgaacatcacttattgtacatgtgaggattcattcaggtgataaaccttacgaatgcaatgtttgtggaaaagccttctctcagagctcatctctcactgtgcatgtgagaagccatacaggggagaagccctatggttgtaatgaatgtgggaaagctttctctcagttctcaacccttgctctgcatttgagaatacacacaggtaagaagccttatcagtgcagtgaatgtgggaaagctttcagccagaagtcacaccacattagacaccagaaaattcatactcactaaaaaccccatgaaagccttgaaagtgggaaagctttcattagaaatttgcacctcatcatgccccagaaataatccttctgaagcaaagcaccacgaatgaggttaactttaacaagtactaaaaacttaagggacaccagaaaatttgtactgaagagaaagacatgcatatgattaaaaccctgtgtccaacagagaaacctgcagcagagataatggtgaaagtttaggcacattttcactaaaagtgggaacagaaaatggaggcctgttttttattgctaccaccatagatctggagatcttcgccagtaacaagaaaaattaagttgtaaatattggaaaggaacagacaaaaatagatgacatggtcatctacaactaatattaagactcctgtggtattgattgagcagagcagaagagatttcaaaaaaagacctatgcatttattagaatttggaatatgatacaagtggcatcaggaaatgaggaaataatggaactattttttttaagtggaggtagtttgttctccaagggggaaaaatagaccatgaactatacacaaaagtgaatccagagattaaaaacagaaatatggaaaagctatgtactaaaatgcatatgaccttgggaatagggaaacattccttggaacaatttgagaaatacttagcggttctacttatgagtatgaatgctcaggaaatacgcactaggatatttactgtggcttgatttgtagtagccaaaaattagaaacaactgagaaagcccatcacgaacaatatgggaaattcttatgtaatactatatatctgtaaaatgcaacaaatgaaatccacatgtattaacagaaagatcccagaattgttgaggggggatcaagttgcagaatgatacagatagtacaatgacttttttgtaaatttgaattaaaagtttcctcataaaactcagtactatctattggtaatggatgcatatatgtatgtacatgtacatgtttttgaaacggattggaaggatacagaccaaactcttgatagtggtcacctgtgaagagtggagaagggaaaataatgagtgtgggaggtgggatgggtattggttaaaggggacttcagctttttatataaacatccacttctctttcaaaagacttcaagtaaatataagaagatactgattgattctggattgtggtatagggatatcttgtcttattttttgtacttttctgtatttttaaaatttctcaaaataggaatgggagtgaggatgggaatgctgtatctgtggaagtcatgttatactggattcatttccaattaaatactaaacattttatagaaaatatttctaaaattttatcacggatgaatggatggacttgctctctatgtaatatgaaattaatctattttattaaaatttaaaaggacagcacaatccaaatctgttttaattattttaacatggcatacacactatatcggggtccccagctccc

SEQ ID NO: 84 - DNA, 1658 bp, Homo sapiens
  misc_feature: Template ID: 1082203.1
gatcaggaaaactgagacaaatttgtcaggcaagtcgtagtcatcaacaacaaaagaatatctgaagagtcaggtcatccatataatatatctggaaaaatatttcatgactgcacagacctagatacttcaaaacaaagactgtgtaagtgtgattcatttgaaaagaccttgaaaccaaatattaacctagtgagttataataggaattttgcaagaaaaaacattgatgagaattttagatgtgggaaaacacctagctacagttcttgctattctaagcatgaaaaaaatcatagtggaatgatacactgtgaagctactcattgtggaaagattcttagccataaacaatctcttattcattatgtgaatgttgaaactggggagaagacctatgtatgtgttgaatgtggaaaatcctttctcaagaagtcacagattattatacatcaaagaattcatactggagagaaaccttatgattgtggtgcatgtggaaaagccttcagtgagaagtcacaccttattgcacatcagagaactcatactggggagaaaccttatgattgttctgaatgtggaaaaggcttttctcagaaatcatccctcattatacatcagagagttcactctggggaaaaaccatatgaatgtagtgaatgtgagaaagccttctcccagaaatcacccctcattatacatcagagaatacatactggggaaaagccctatgaatgtagagtgtgggaaagccttttcccagagtcacagctgattatacatcacagagctcatactggagagaagccatgtaagtgtactgaatgtgggaaagcattctgttttatacattaaagaattcacactggtgagaaaccctacaaatgtgctcaatgtgaggaagccttcagcaggaagtcagaactcattatacatcagataattcatactggggagaaaccgtatgaatgtacagaatgtgggaaaacattctctcgcaagtcacaactcatcatacatcagagaacccacactggagagaaaccctataaatgtaccaaatgtggaaaatccttctgtcagcagtcacatctcattggacatcagagaattcacacgggagaacaaccttatgtatgttctgaatgtgggaaagccttctctcagaagtctcacctcccagggcattggtgaattcatacaggagagaaaccttacatatgtgctgaatgtggaaaggccttttctcagaagtcagaccttgttgtacatcagataattcatactggagagaaacctgatcgatgtactgtatgtgggaaggccttcatccagaagtcccaactcactgtacatcagagaattcatacactaatgaaatcataagaatggtctgaacacagaaaagccttcagggtcagttcaagccttaatagatagtgcaacaaccaatggatttgatgattttggggactacatctttgttgataaaattttacaagtgaagtcatgttcctaatgtatttcattctttatcaaagataatagagaagtcaatacgtaaatgatggacattttcactatggcatataaaagtttttaaattgagaaatgaatgattagcataacagaacgaattgcatgtacatctcttt

SEQ ID NO: 85 - DNA, 978 bp, Homo sapiens
  misc_feature: Template ID: 1096748.6
  unsure 938, 940, 975: a, t, c, g, or other
ccgcgagctgccgtcggctccgcggggggggcgggccgggcaccccggggcgcggaggagcgctcctcgcttctctccttcccccctgccgcactccgccggaccctcccgccggcccgcgccgctgcactcgccctctcctctcgccccccggcaaactttcggcccctccccgcccctcgcccgttattcgtcgtggctcaagcccggccacgccgccccaagggctcctcccgacctcccggcctgccgctccggccactgcgggatccagaaacatgtcgaccacacttctgtccgccttctacgatgtcgacttcttgtgcaagacagagaaatccctggccaacctcaacctgaacaacatgctggacaagaaggcggtggggacgcctgtggccgccgcccccagctcgggcttcgcgccgggattcctccgacggcactcggccagcaacctgcatgcactcgcccaccccgcgcccagccccggcagctgctcgcccaagttcccgggcgccgctaacggcagcagctgcggcagcgcggcggccggcggtccgacctcctacggcacccttaaggagccgtcggggggcggcggcacagccctgctcaacaaggagaacaaattccgggaccgctcgtttagcgagaacggcgatcgcagccagcacctcctgcacctgcagcagcagcagaaggggggcggcggctcccagatcaactccacgcgctacaagaccgagctgtgccggcccttcgaggagagcggcacgtgcaagtacggcgaaaagtgccagttcgcgcatggcttccacgagctgcgcagtctgactcgccatccgaagtacaagaccgagctgtgccgcacctttcataccatcggcttctgcccctatgggccgcgctgccacttcatccacaacgcggacgancngcggcccgcgccgtcggggggcgcctccggggacntgc

SEQ ID NO: 86 - DNA, 2969 bp, Homo sapiens
  misc_feature: Template ID: 1098409.1
gagcaattgattaatagctcggcgaggggactcactgactgttataataacactacaccagcaactcctggcttcccagcagccggaacacagacaggagagagtcagtggcaaatagacatttttcttatttcttaaaaaacagcaacttgtttgctacttttatttctgttgatttttttttcttggtgtgtgtggtggttgtttttaagtgtggagggcaaaaggagataccatcccaggctcagtccaacccctctccaaaacggcttttctgacactccaggtagcgagggagttgggtctccaggttgtgcgaggagcaaatgatgaccgccaaggccgtagacaaaatcccagtaactctcagtggttttgtgcaccagctgtctgacaacatctacccggtggaggacctcgccgccacgtcggtgaccatctttcccaatgccgaactgggaggcccctttgaccagatgaacggagtggccggagatggcatgatcaacattgacatgactggagagaagaggtcgttggatctcccatatcccagcagctttgctcccgtctctgcacctagaaaccagaccttcacttacatgggcaagttctccattgaccctcagtaccctggtgccagctgctacccagaaggcataatcaatattgtgagtgcaggcatcttgcaaggggtcacttccccagcttcaaccacagcctcatccagcgtcacctctgcctcccccaacccactggccacaggacccctgggtgtgtgcaccatgtcccagacccagcctgacctggaccacctgtactctccgccaccgcctcctcctccttattctggctgtgcaggagacctctaccaggacccttctgcgttcctgtcagcagccaccacctccacctcttcctctctggcctacccaccacctccttcctatccatcccccaagccagccacggacccaggtctcttcccaatgatcccagactatcctggattctttccatctcagtgccagagagacctacatggtacagctggcccagaccgtaagccctttccctgcccactggacaccctgcgggtgccccctccactcactccactctctacaatccgtaactttaccctggggggccccagtgctggggtgaccggaccaggggccagtggaggcagcgagggaccccggctgcctggtagcagcttcaagcagcaagcagcagccgccgccgccgccgcctataacccacaccacctgccactgcggcccattctgaggcctcgcaagtaccccaacagacccagcaagacgccggtgcacgagaggccctacccgtgcccagcagaaggctgcgaccggcggttctcccgctctgacgagctgacacggcacatccgaatccacactgggcataagcccttccagtgtcggatctgcatgcgcaacttcagccgcagtgaccacctcaccacccatatccgcacccacaccggtgagaagcccttcgcctgtgactactgtggccgaaagtttgcccggagtgatgagaggaagcgccacaccaagatccacctgagacagaaagagcggaaaagcagtgccccctctgcatcggtgccagccccctctacagcctcctgctctgggggcgtgcagcctgggggtaccctgtgcagcagtaacagcagcagtcttggcggagggccgctcgccccttgctcctctcggacccggacaccttgagatgagactcaggctgatacaccagctcccaaaggtcccggaggccctttgtccactggagctgcacaacaaacactaccaccctttcctgtccctctctccctttgttgggcaaagggctttggtggagctagcactgccccctttccacctagaagcaggttcttcctaaaacttagcccattctagtctctcttaggtgagttgactatcaacccaaggcaaaggggaggctcagaaggaggtggtgtggggacccctggccaagagggctgaggtctgaccctgctttaaagggttgtttgactaggttttgctaccccacttccccttattttgacccatcacaggtttttgaccctggatgtcagagttgatctaagacgttttctacaataggttgggagatgctgatcccttcaagtggggacagcaaaaagacaagcaaaactgatgtgcactttatggcttgggactgatttgggggacattgtacagtgagtgaagtatagcctttatgccacactctgtggccctaaaatggtgaatcagagcatatctagttgtctcaacccttgaagcaatatgtattataaactcagagaacagaagtgcaatgtgatgggaggaacatagcaatatctgctccttttcgagttgtttgagaaatgtaggctattttttcagtgtatatccactcagattttgtgtatttttgatgtacactgttctctaaattctgaatctttgggaaaaaatgtaaagcatttatgatctcagaggttaacttatttaagggggatgtacatatattctctgaaactaggatgcatgcaattgtgttggaagtgtccttggtgccttgtgtgatgtagacaatgttacaaggtctgcatgtaaatgggttgccttattatggagaaaaaaatcactccctgagtttagtatggctgtatatttctgcctattaatatttggaattttttttagaaagtatatttttgtatgctttgttttgtgacttaaaagtgttacctttgtagtcaaatttcagataagaatgtacataatgttaccggagctgatttgtttggtcattagctcttaatagttgtgaaaaaataaatctattctaacgcaaaaccactaactgaagttcagataatggatggtttgtgactatagtgtaaataaatacttttcaacaat

SEQ ID NO: 87 - DNA, 888 bp, Homo sapiens
  misc_feature: Template ID: 1098584.1
gctttaggtggaatattaaattcttctgaatacagctaaaaactctgaaagattctgattgcctgatccatactgtagtgatcatagaaccttccctgaggaattgtgaatttgagagaatcttcttattatggctatgatcagagatccctaaagaatggagatctgggtttcttgtatgctgaagagcacttgagagagactggtttgtgtatctaattgatgagaaaggcctagttaataaatgtccataaatgtagccaactttattgcaagccatgctgcccccaaaatagccctaagagttgtacctgaccaaataactcagtccagttttacaggacgtgaagactgagtattccatccccagacaatgcaatttcagttatctgagtttttaatcctgactgggatgagagaaggctgagtgatagaagtatctgaatatgtggtattattcctcctgcaactcagggaagaacagagaaactggcaaagtgaacatcctatttaaaaaagaaaaaaggaaaagatgtgtttcatctgatcttgaaaaacattaactagaaaaaaagaacaaacatctattttcctttagaaaagtgaagacacaatctccaaaatgaatgacttcatgaggatgcagatactgaaggaagggagtcattttccaggaccgttcatgaccagcataggcccagctgagagccatccccacactcctcagatgcctccatcaacaccaagcagcagtttcttaaccacggtacaagttccctcttcccaatacattcccctcactacaatgtaatgacaaggattaacacaaccttgaaagcacctcaccaatcccctactacatacaatgctttaatttaaccaaatcag

SEQ ID NO: 88 - DNA, 2906 bp, Homo sapiens
  misc_feature: Template ID: 040652.29
gtatctccttatatttactctccatctcacgacttttcagcttataagggatccaaactatgtaagattataccaccaaaagtgattcaacattcaaaatgaagcaagatacttcattttcttagcgtttctggagattacaacatcctgcggttccgtttctgggaactttactgatttatctcccccctcacacaaataagcattgattcctgcatttctgaagatctcaagatctggactactgttgaaaaaatttccagtgaggctcacttatgtctgtaaagatgggaaaaaaatacaagaacattgttctactaaaaggattagaggtcatcaatgattatcattttagaatggttaagtccttactgagcaacgatttaaaacttaatttaaaaatgagagaagagtatgacaaaattcagattgctgacttgatggaagaaaagttccgaggtgatgctggtttgggcaaactaataaaaattttcgaagatataccaacgcttgaagacctggctgaaactcttaaaaaagaaaagttaaaagtaaaaggaccagccctatcaagaaagaggaagaaggaagtggatgctacttcacctgcaccctccacaagcagcactgtcaaaactgaaggagcagaggcaactcctggagctcagaaaagaaaaaaatcaaccaaagaaaaggctggacccaaagggagtaaggtgtccgaggaacagactcagcctccctctcctgcaggagccggcatgtccacagccatgggccgttccccatctcccaagacctcattgtcagctccacccaacagttcttcaactgagaacccgaaaacagtggccaaatgtcaggtaactcccagaagaaatgttctccaaaaacgcccagtgatagtgaaggtactgagtacaacaaagccatttgaatatgagaccccagaaatggagaaaaaaataatgtttcatgctacagtggctacacagacacagttcttccatgtgaaggttttaaacaccagcttgaaggagaaattcaatggaaagaaaatcatcatcatatcagattatttggaatatgatagtctcctagaggtcaatgaagaatctactgtatctgaagctggtcctaaccaaacgtttgaggttccaaataaaatcatcaacagagcaaaggaaactctgaagattgatattcttcacaaacaagcttcaggaaatattgtatatggggtatttatgctacataagaaaacagtaaatcagaagaccacaatctacgaaattcaggatgatagaggaaaaatggatgtagtggggacaggacaatgtcacaatatcccctgtgaagaaggagataagctccaacttttctgctttcgacttagaaaaaagaaccagatgtcaaaactgatttcagaaatgcatagttttatccagataaagaaaaaaacaaacccgagaaacaatgaccccaagagcatgaagctaccccagggaacagagtcagcttccaaatccttcagaggccagcacaaccttccctgagagccatcttcggactcctcagatgccaccaacaactccatccagcagtttcttcaccaagaaaagtgaagacacaatctccaaaatgaatgacttcatgaggatgcagatactgaaggaagggagtcattttccaggaccgttcatgaccagcataggcccagctgagagccatccccacactcctcagatgcctccatcaacaccaagcagcagtttcttaaccacggtacaaaaaagtgaagacacaatctccaaaatgaatgacttcatgaggatgcagatactgaaggaagggagtcattttccaggaccgttcatgaccagcataggcccagctgagagccatccccacactcctcagatgcctccatcaacaccaagcagcagtttcttaaccacgttgaaaccaagactgaagactgaacctgaagaagtttccatagaagacagtgcccagagtgacctcaaagaagtgatggtgctgaacgcaacagaatcatttgtatatgagcccaaagagcagaagaaaatgtttcatgccacagtggcaactgagaatgaagtcttccgagtgaaggtttttaatattgacctaaaggagaagttcaccccaaagaagatcattgccatagcaaattatgtttgccgcaatgggttcctggaggtatatcctttcacacttgtggctgatgtgaatgctgaccgaaacatggagatcccaaaaggattgattagaagtgccagcgtaactcctaaaatcaatcagctttgctcacaaactaaaggaagttttgtgaatggggtgtttgaggtacataagaaaaatgtaaggggtgaattcacttattatgaaatacaagataatacagggaagatggaagtggtggtgcatggacgactgaccacaatcaactgtgaggaaggagataaactgaaactcacctgctttgaattggcaccgaaaagtgggaataccggggagttgagatctgtaattcatagtcacatcaaggtcatcaagaccaggaaaaacaagaaagacatactcaatcctgattcaagtatggaaacttcaccagactttttcttctaaaatctggatgtcattgacgataatgtttatggagataaggtctaagtgcctaaaaaaatgtacatatacctggttgaaatacaacactatacatacacaccaccatatatactagctgttaatcctatggaatggggtattgggagtgcttttttaatttttcatagtttttttttaataaaatggcatattttgcatctacaacttctataatttgaaaaaataaataaacattatcttttttgtgaaaaaaa

SEQ ID NO: 89 - DNA, 1167 bp, Homo sapiens
  misc_feature: Template ID: 1099277.17
  unsure 1164: a, t, c, g, or other
gggacctgcaacgtccgacagaacgaggggacgtaacggaggcaggttggagccgctgccgtgcgccatgacccgcggtaaccagcgtgagctcgcccgccagaagaatatgaaaaagcagagcgactcggttaagggaaagcgccgagatgacgggctttctgctgccgcccgcaagcagaggtagccccagggaggggagggaaagggacggtggagacctgggttagaccaagggttatagaaggaaagagagctacctcagggcttgaatgtggactagtcgtgaggagcagagtgcattgcttcctctagggttttatttcctccccaccctccaaattgttagctcacagccttacaggaaaggacgggggcgggcgcctgccctcagtctgatttctgagcgtccctgggtctgaccttaagggcaagggcagggagcttcacatttcaaatacagttgtggttacggcagcccagtacttttggccctccttgctgttcggttctcctcccttctcccaacctcctcactggtgttgctgggtgtggtcctcaatacagaatagagacccttgggcctgtgtcaccagacttctgaccccttgggcaacagccagatggagactggtcgccttttgagcctcagctctcttcctcttgttctcctagggtgggagtacagcagccaaacgctgaacttagtcccatccacttccatcttatcctttgtgcccttcatccccctgcatcttgtcctttttgccctctggtacctcccagtgccccatcatctctacccccagggactcggagatcatgcagcagaagcagaaaaaggcaaacgagaagaaggaggaacccaagtagctttgtggcttcgtgtccaaccctcttgcccttcgcctgtgtgcctggagccagtcccaccacgctcgcgtttcctcctgtagtgctcacaggtcccagcaccgatggcattccctttgccctgagtctgcagcgggtcccttttgtgcttccttcccctcaggtagcctctctccccctgggccactcccgggggtgagggggttaccccttcccagtgttttttattcctgtggggctcaccccaaagtattaaaagtagctttgtaattccttaaaaaaaaaaaaaanggg

SEQ ID NO: 90 - DNA, 2037 bp, Homo sapiens
  misc_feature: Template ID: 197748.7
  unsure 600-624: a, t, c, g, or other
gaattatttgaggaaaatgaggaggaagatgaagttattgatgaccaggaagaggatgaagaagaaacagatgatagtgacacttgggaacctccacgacatgtgaaacggaagctgtctaaatcagatgactgaaatctgcctaaaacgttgaaggagaatcaattcttcaactcaagatgtctgatttactgtgaatttgcccaatctttgatgacattgaaaacgttttggggcatacacactcaaaaagcaggatccaatacccaaaagaaatggaacttaatgttgtgccaaagttaaactactgcagttggtggaagttctgcaatgtaaatagaacactaattaaaaaacaacttgtaaaaatgcaatttaaattttaatacagtacatttttcttctaatatgatggagacattctgaatcttagactttctgagggggtttaatgaccactagagcttgtcctcatattcagtccagtttaatactgtatgtctagtaagatgggctatatattgcctctattctttgagatgtgattaagcttagaactttgaccaaaaattttacagtaaaaattgttagaaatgggtnnnnnnnnnnnnnnnnnnnnnnnnntgatttattactatgtcttatttatcagaccctgcactaagattaaaagttgtgcatgggcttatacaatttcaaatgtaaaaacagcctatttatatatgttgaaacaataagattttatggtttcactggcccttaataattggatccttcattaaacacatccatgaataccactgtttctactgttacttgttccattagaagctgatttgctttttattaaactgcaggaaattaattctgaagaaggaaaagaaactgacatggtaatttggatagggtgaagctttgaaataaatactgcaccaaaaatgtgaaaaagaatcacgtagtaaatgtatacttagtgttttcttacaatcgtggaaatcagaaatgtttatacaggtgtcagatcagaatttttaagagttatctttcagtgaaattttataacagtttcagtgaatagagaaaaaattctgaactgatcataatgagttaaaagttagcttttcacttatgaatcatgggagtgttaactgttaactcttgccgtatcaggagactgaaagttcatactaatttacaaactttgtaaagactggtgctgttcattcatattgggaagaaccctttcttttgtgaccataggaccatttttcaaaatgcgctttcttcgtagaagaaatgttcagtttaattagctttggattttaacatgtttttctgaatgaccagatgtaggcttagccagtttattttctctaatttaatggataataaatattaagctcttggttaaatgtttttcagccattgaaaatgttatgaaaaagccttgaatatgcatgctgctttcatttttataaactttttattttttaactatagctttattagtaattccaaaatgctgcaatgtagctgatttcctcactcagacagctggctttgtgggtggcttttttcatactactgttaacttttttaaaaaagaagcaatgtaaagaccgtaatgcactaagctttttttttttcttttacacgtttaaaaacttcttaaagcactctgtaatataatgattaaattgctcccttttataaacattgctaatgtggtctgagttttgtttgacaataattttaatgttctcaaaatttgaaatgtcaagtattagaaatgaagcctttgaatatagttgtttcccttgcaatatgttaactctgtgtagctgtatataactattaatttccctcatctcttttataggcctgataaaactcttctctgacgtttgctagcttttaaatatatttatttgacagagcaaaagaaccctcttctggttgattgtgaccttgaatacaaaataaaagtagtgattagtagtttacagtgaccttttttttttcattttattaacaaag

SEQ ID NO: 91 - DNA, 1833 bp, Homo sapiens
  misc_feature: Template ID: 241930.15
gctgctaagagcgctgggtcctgcttgtgctcagctccagctcactggctggccaccgagacttctggacaggaaactgcaccatcctcttctcccagcaagggggctccagagactgcccacccaggaagtctggtggcctggggatttggacagtgccttggtaatgaccagggctccaggaagagatgtccttgtggctgggggcccctgtgcctgacattcctcctgactctgcggtggagctgtggaagccaggcgcacaggatgcaagcagccaggcccagggaggcagcagctgcatcctcagagaggaagccaggatgccccactctgctgggggtactgcaggggtggggctggaggctgcagagcccacagccctgctcaccagggcagagcccccttcagaacccacagagatccgtccacaaaagcggaaaaaggggccagcccccaaaatgctggggaacgagctatgcagcgtgtgtggggacaaggcctcgggcttccactacaatgttctgagctgcgagggctgcaagggattcttccgccgcagcgtcatcaagggagcgcactacatctgccacagtggcggccactgccccatggacacctacatgcgtcgcaagtgccaggagtgtcggcttcgcaaatgccgtcaggctggcatgcgggaggagtgtgtcctgtcagaagaacagatccgcctgaagaaactgaagcggcaagaggaggaacaggctcatgccacatccttgccccccagggcttcctcacccccccaaatcctgccccagctcagcccggaacaactgggcatgatcgagaagctcgtcgctgcccagcaacagtgtaaccggcgctccttttctgaccggcttcgagtcacgccttggcccatggcaccagatccccatagccgggaggcccgtcagcagcgctttgcccacttcactgagctggccatcgtctctgtgcaggagatagttgactttgctaaacagctacccggcttcctgcagctcagccgggaggaccagattgccctgctgaagacctctgcgatcgaggtgatgcttctggagacatctcggaggtacaaccctgggagtgagagtatcaccttcctcaaggatttcagttataaccgggaagactttgccaaagcagggctgcaagtggaattcatcaaccccatcttcgagttctccagggccatgaatgagctgcaactcaatgatgccgagtttgccttgctcattgctatcagcatcttctctgcagaccggcccaacgtgcaggaccagctccaggtagagaggctgcagcacacatatgtggaagccctgcatgcctacgtctccatccaccatccccatgaccgactgatgttcccacggatgctaatgaaactggtgagcctccggaccctgagcagcgtccactcagagcaagtgtttgcactgcgtctgcaggacaaaaagctcccaccgctgctctctgagatctgggatgtgcacgaatgactgttctgtccccatattttctgttttcttggccggatggctgaggcctggtggctgcctcctagaagtggaacagactgagaagggcaaacattcctgggagctgggcaaggagatcctcccgtggcattaaaagagagtcaaagggttgcgagttttgtggctactgagcagtggagccctcgctaacactgtgctgtgtctgaagatcatgctgaccccacaaacggatgggcctgggggccactttgcacagggttctccagagccctgcccatcctgcctccaccacttcctgttt

SEQ ID NO: 92 - DNA, 2409 bp, Homo sapiens
  misc_feature: Template ID: 246504.1
caggcttgtgtagatcatgccgccagtagcggccctgactgccgaggaaacggtagcttaggacagttggctgttaagtgacactgattctccccgccccgcctgacccccgagaaggaggcttgtcccccgctgcgtgagggggtggggaagtgggtagtgaattcggatctacctgggaggggggagtggaagttcccgccccggagagcggcgaggcggcagccacagttgattatggaagattcccacaagagtaccacgtcagagacagcacctcaacctggttcagcagttcagggagctcacatttctcatattgctcaacaggtatcatctttatcagaaagtgaggagtcccaggactcatccgacagcataggctcctcacagaaagcccacgggatcctagcacggcgcccatcttacagaaaaattttgaaagacttatcttctgaagatacacggggcagaaaaggagacggagaaaattctggagtttctgctgctgtcacttctatgtctgttccaactcccatctatcagactagcagcggacagtacattgccattgccccaaatggagccttacagttggcaagtccaggcacagatggagtacagggacttcagacattaaccatgacaaattcaggcagtactcagcaaggtacaactattcttcagtatgcacagacctctgatggacagcagatacttgtgcccagcaatcaggtggtcgtacaaactgcatcaggagatatgcaaacatatcagatccgaactacaccttcagctacttctctgccacaaactgtggtgatgacatctcctgtgactctcacctctcagacaactaagacagatgacccccaattgaaaagagaaataaggttaatgaaaaacagagaagctgctcgagaatgtcgcagaaagaagaaagaatatgtgaaatgcctggaaaaccgagttgcagtcctggaaaatcaaaataaaactctaatagaagagttaaaaactttgaaggatctttattccaataaaagtgtttgattcctaagaaagaaaatatttttgtggacatgcataaaaattaaatggatttcctagtggagttttataaattaaaaggtcaaaactgaagctttttatttaggcttttccaaatcaaggataaatatcttacgcacgatatctagtgacagaggagaaagtggaaaatgacctcaaggaagctacgggcacaactggaagccttgtagaaattaaacatattcaaggagcaagaaatgaactttcagcagtctaaattttctaaataaccaatagttgccaatctaaaatggcagagaagatgaaatttgataaactgaattttttttaaaaatccatttaccctacaggtttgcatttgtttgctgaaatttacctttttttagttatatatatgtgtgtgtgtgtggtgtaatttctgccaataaattctaaattacaaaggtaagagaaaacctagtacattactaaatatataaagtatatgttctgattatgtatacttgttctagtgtcaagtctttttaagtgggtttttaaaagtttgttattggacttgaatggatttttgagactaggttaattatttttgaggtcttatcctaaaaggcatctaaggtacatgaatggagtatggtgattttataacattttttatcagaatggaaaaagaactgtttaaaagtttgatacttttaaatagttggtttttttgcttactctggtaatgattttctacaaatacataataaattgtttttttgattctatattctgtatgcagttgaatatccattacttattctgctgtgctttaatagaatggaatgtttacaggcccttaaaatattatttttaaaaaaccttctgaagatacataccaaagtttttccaagaagattttataatcaatttaataatgtaaggtttatcagattctataatagtatagttattaaggcaattttatgttagagactattttgtaatgtagtgagtggtacctttataagaaaagtgactgccaatatatttttatagctgatctttataaattctaatgttgagtttttaatgattattttaaatgtttatatagtttagtaaaatttgcatctcaaagtatcatttttatattatgggacgttttcagattggctaatatttgcattgtaaattttgtatgcagtttatctaaaattcaaaaatactgtcagtacaccagcgtttaacatctatattccaatttgtatacagtttaaaattgtactgcaaaactattgtgtgctcttacacagtatgcatcatattgttgtctgtgaaattaaaggacatttgatagtctactggaatgta

SEQ ID NO: 93 - DNA, 2121 bp, Homo sapiens
  misc_feature: Template ID: 253341.11
  unsure 59: a, t, c, g, or other
ggcggtctccacagagtcactcatgtggttgcatcagctggtgaagggataggcttgtngcccgggacgccttgctccccctccctgcagcctctccaggtggccagttaggacttcctcacatcccggtggtgtcagggtgttcagaattcttacatgatggttggcttccaaaagaacgaaagcagaagttagcattcctcttacaaggagttaaagttcctcgtaattttcgcttgttggaagaacttgaagaaggacaaaaaggagtaggcgacggtacagttagctgggggccttgaagatgatgaagatatgacacttacaaggtggacaggcatgattattgggccaccaaggacaaattatgaaaacagaatatatagcctgaaagtagaatgtggacctaaatacccagaagctcctccgtcagttagatttgtaacaaaaattaatatgaacggaataaataattccagtgggatggtggatgcccggagcataccagtgttagcaaaatggcaaaattcatatagcattaaagttgtacttcaagagctaagacgtctaatgatgtccaaagaaaatatgaagcttccacagccaccagaaggacaaacatacaacaattaattttagtggatctcaaacttgtcttaaatcaacaaccttctactcatgttaatgtcttgattaaatatcacaatgcaaaatacacattaagtaaaagaattccagctggtaaacatgacctggacatttgtaagaatatatttaatatatgtacacccattatgttttcaggtaacaggaggaaaaatgcagcacaattttttttctcttgaaaggcactgtcatttaaacataaacctggagtactcgaaatagaattcaggtttacaagatgaaagcgtgtggagaagtgtcagatggcagtggaagcatgtgtgtttctaaaaagtaaaaatctcaagaaaacagaaatggcatgctttacccatcttacttagtgaaagagagctgcagttgaaattgtttaaaaagtagcaggtacaatgaatattgtcacagatgtgttaatttttgaagcaatgtgggtgctgactactagtagtatcaaaaatatgttcaggattgttttgatacctgtatttataataaaaaatgttggggggagttgatgaattcctgttaaaagctgttcttgtgtgttacatgtaacagacatggtaaatatttgtttacagtctttgtttaacaaaccatgcatttaagtttaagtgaagtcaacaaaaaggaaataggtgtatggatatgtgattttgagattaaagttagtcttaaaatgtaaataaaatgtgaaacgtgtcctcagagactgtgccatttctattatgttgatgtatatgtacagtaccttgccagggaagcaaaaattggaattattgtagcttttcatgtatacacacttttatttaccctattttgtgtacttcttgtgaattataatttgcagactatttcagaaaagaaattatctagtttaatttcttctttggacaaggagtcctaggtattatattttgagtttgatttcaccagaaataataatattaaaaagatctttgcattctggcagttcttttaggattataggttgcaaattatccaaatatatatcccattttttaaagcataatatcttttttagttgtttttctgtgaagcttttggttaataaatagggtcaactaattggagacttttctcttccaattagggcttttaatactaacaaggataactttattcattcctcgtattctctactctaacaaatatgaactctgaagttgaaaagtcatttatgttccgctttcaccaaagtgacgtgaggctttaggtcactgtttcacttcaaagtactggatccaaagctttgttgaaaatgctgtttgatgaattcactgaagaatatagaaaggtggtcaggtaaagtctacttttattttgtcaagcttaataatttgtgtcatactttaccccagtatatataggcaaaccaaaaccttatcaaatattaaattagttgtttaaactttgcttataaagtattggcca

SEQ ID NO: 94 - DNA, 3473 bp, Homo sapiens
  misc_feature: Template ID: 334064.3
gagaggaaggttccaacttcctaactccaacattaaccctttgaatgtattcttatgccagagaaaggcacataaagtactggtgtttgaacagataacttccaacatgtcctctgtttgtgatatgtcttttctgcagaaatcttgcatcaccatggtgcacttctgtggcctactcaccctccaccgggagccagtgccgctgaagagtatctctgtgagcgtgaacatttacgagtttgtggctggtgtgtctgcaactttgaactacgagaatgaggagaaagttcctttggaggccttctttgtgttccccatggatgaagactctgctgtttacagctttgaggccttggtggatgggaagaaaattgtagcagaattacaagacaagatgaaggcccgcaccaactatgagaaagccatctcccagggccaccaggccttcttattggagggggacagcagctccagggatgtcttctcttgcaatgtgggtaacctccaacctgggtcgaaggcggcagtcaccctgaagtatgtgcaggagctgcctctggaagcagatggggctctgcgctttgtgctcccagctgtcctgaatcctagataccagttctctgggtcgtctaaggacagttgccttaatgtgaagactcctatagtccctgtggaggacctgccctacacactcagcatggtcgccaccatagattcccagcatggcattgagaaggtccaatccaactgccccttgagtcctaccgagtacctaggagaggacaagacttctgctcaggtttccctggctgctggacacaagtttgatcgggacgtggaactcctgatttactacaatgaggtgcatacccccagcgtggttttggagatggggatgcctaacatgaagccaggtcatttgatgggagatccatctgcaatggtgagtttctatccaaatatcccagaagatcaaccatcaaatacctgtggagagtttatctttctcatggaccgctcgggaagtatgcagagccccatgagtagccaggatacatctcagctgcgaatacaggcagccaaggaaacactgattttgctgctgaagagtttacctataggctgttatttcaacatctatggatttggctcttcctatgaggcatgctttccggagagtgtgaagtacactcagcaaacaatggaggaggctctggggagagtgaagcttatgcaggccgacctagggggcactgaaatcttggcaccactccagaacatttacaggggaccctccatcccaggccaccccctacagctttttgtctttacagatggagaagttacagacacgtttagtgtaattaaagaagttaggatcaacagacagaaacacaggtgtttctcatttggtattggagaaggcacctccaccagcctaataaaaggtattgcccgggcatcagggggcacctcagaatttatcacaggcaaagacaggatgcagtccaaggctctcaggactctgaaacgctctctgcagcctgtggtagaggatgtctctctgagctggcatttgcctcctggtctgtctgctaaaatgctttccccagaacagactgtcatctttaggggtcagagattaatcagctatgcccagctgaccgggaggatgccagcagcagagacaacaggagaagtatgcctcaaatatacactccagggcaagacttttgaggataaggtgacatttcctctacaacccaagcctgatgtcaacctcaccattcaccgccttgctgccaagtccttgctccagaccaaggacatgggcctcagggagactccagcaagtgataaaaaaaagatgcattgaaccttagccttgagtctggtgtcataagctccttcacagctttcattgctatcaataaggagctcaacaagccggttcaggggcctctggctcatagggacgtcccaaggccaattctgttgggtgcttctgccccattgaagataaaatgccaatcaggttttcgaaaggccttacactctgaccgtcctccttctgcatctcagcccagaggggaacttatgtgttataaggccaagacattccagatggacgattacagtctctgtgggttgataagtcacaaggaccagcacagtccaggctttggagagaatcaccttgtgcagctgatttaccaccaaaatgcaaatggttcctgggatctgaatgaagatctagccaagatcctaggtatgagtttggaagaaataatggctgcacagcctgccgagcttgtggattcctcaggctgggccaccatcctggccgtgatctggctgcacagcaatggtaaggacttgaagtgtgaatgggagcttctggaaaggaaggccgtggcctggatgcgtgcccatgcaggctccaccatgccttcggttgtgaaagctgctattactttcctgaagtcatctgtggatcctgctatctttgccttttgaagataccatccagaaaaagaagtgcctttaatttgctactgtcatttcctctagtatcacttttgctgtgatgatgtgttcttgtgttttataactctttattttttgccataaaagtaaaggatgcttactccacttcgcttctctgctccaggttcactttggatgtgatctttcttttcccaacatatgccctcagaaaagtgacagtggtcccagaacctattccctttcttgagggagttcaaaacattcataggcagtaatgttcctcccagggtttccagggaaacaacatgaaaaacaggtgacatgaactacagactaaagattgcagcatttatgttagagaatgcttgaattagagaattttctgcattatctttgtctgttcactttctatcttatatacttatcagggccatactggtaagcttgtgtaggaggagttagagggaagttgaaagccaacatctggatcaatgtaatgtcaagatcacaaagagagagactgcaggggtccactgtgagaggtgacactgttggggaccttcctgattcattcttcttgggctttgctagcctgtacaacctacatgtcttttcttccactgcctgaaagacttgggttgaactataactgttggagagagatgttcctctttaatcatgaaacaccttaagaagtctataatgcaatccttagtcctaccctgaacctatgtgtcctctaagtcaggccctgatctagtgcagtaaagggaagggtgggcttaatgggagctttgcctgggacctgaacctggagcacttaccgcattaggaagaaaggagctccccgtaatcgttcctgacccttgtgtctcatataccctatcctggtggaaatgaccctatttgatatgctgtcccttaaaataacttgtatcaatattaaaatgactatttctaccctt

SEQ ID NO: 95 - DNA, 6577 bp, Homo sapiens
  misc_feature: Template ID: 347723.6
gcgcgcatgcgtgcagctctttggaggcggtagctttttcggcgtcgagactggaggctgagtgctaaactgtgtggggcgcggatgggatccagctgttagtcgggtaggcatagctttgtgttattcttggaaaatttcgcaccacttgtgaattccttgaacctgggcattgcaaacccacttctgttgggcccatctcctttgcactttgctcagattaagactcagttggcgcttcagcagctgaatgccgttgcctcacatggttcaacaccaccttatactttattaaatcaggctttcttgaaaatagccatgtcgagacccaggtttaatcctcgaggagactttccacttcaaaggccacgagcacctaacccttctgggatgaggcctccaggaccatttatgaggcctggatctatgggtctcccaagattttacccagcagggagagcacgtggaattccacacagatttgctggccatgaatcttatcagaacatggggccacagagaatgaatgttcaggtaactcaacacagaactgatccaagattgaccaaagaaaaactggattttcatgaagcacaacagaagaaggggaagcctcatggtagccggtgggatgatgagcctcatatatctgcatcagtggcagtgaaacagagttctgtaacacaggttacagagcagagtcccaaagtacagagccgctatacaaaagagagtgcctcaagtatcttagcaagttttggattatctaatgaagacctagaagaacttagtcgctatcctgatgaacaactaactcctgaaaatatgccattaattttgagggatataagaatgcgaaaaatggggcgccgattacctaatttaccttctcagagcagaaataaagaaacacttggtagtgaagcagtttcaagtaatgtgatcgattatgggcatgcaagcaaatatggctacacagaagatccacttgaagtacgtatttatgatcctgaaattccaactgatgaggtcgagaatgaatttcagtcacagcagaacatttctgcatctgttcccaatccaaatgtgatatgtaattctatgtttcctgttgaagacgtatttcgccaaatggacttccccggtgagtcctccaataatcggtcctttttctcagttgagagtggaaccaagatgtcaggcttacacatttcaggaggacagtcagtccttgaacccataaaatccgtcaaccaatccattaaccaaacagttagccagacaatgagtcaatctctgattcctccatctatgaaccagcaacctttttcgtcggaattaatttcatctgtaagccagcaagagcggatcccacatgaacctgtgattaattcatctaacgtacatgttggatcaagaggaagtaaaaagaattaccagtcacaggctgacattcccattcggtctccctttggtattgtgaaagcatcctggctaccaaagttttcacatgctgatgcccagaagatgaagagacttccaactccttctatgatgaatgattattatgcagcatctccaagaatatttccacatttgtgttctctgtgtaacgtagaatgtagtcatttgaaggattggattcagcatcaaaatacatctactcatattgagagctgtcgacagttacgtcaacagtatcctgattggaatcctgagatcctcccatcgagaagaaatgagggcaatagaaaagaaaatgaaactccacgaagacgttctcattcccccagtcctaggcgttctagaagatcaagctcaagtcacagattccgtcggtctcgaagcccaatgcattacatgtataggccgagaagtcgaagtccaagaatttgccatcgtttcatttctagatacagatccagatccagatcccgttcaccatatcgaattagaaatccatttagaggtagtccaaaatgctttcgatcagttagccctgagaggatgtcaaggagatcagtgagatcatcagatagaaaaaaagcattagaagatgtagtacaacgatctgggcatgggacagaatttaataaacagaagcatcttgaagctgctgataagggacattcaccagcacaaaagcctaaaactagcagtggaacaaaaccatcagttaaacctacaagcgctacaaagagtgattcaaatctaggaggacattctattcgttgtaaatcaaagaatcttgaagatgacactttgtcagaatgtaaacaggtgtctgataaagctgtttctctccagcgaaagcttcggaaagaacagtcattgcattatggttcggttcttcttataactgaattaccagaggatggttgtactgaagaagatgtgagaaaattatttcaaccatttgggaaagtgaatgatgtcctaattgttccatatagaaaagaggcttacctagaaatggaatttaaagaggcaattactgcaattatgaagtacattgaaacaacacctcttacgataaaaggaaaaagtgtgaaaatatgtgttccaggaaagaaaaaagcacagaacaaagaggtgaagaaaaagactttagagtcaaagaaagtatctgcatctaccttaaaaagagatgcagatgcttcaaaagctgttgaaattgttacttcaacttctgctgccaaaactggacaagccaaggcatgtgtagccaaagtaaacaaatctacagggaaatcagcaagttctgtaaaatctgtggtaacggtagctgttaaaggtaataaagcttcaatcaaaacagcaaaatctggtggaaagaagtctctagaagccaaaaagactgggaatgtcaaaaacaaagactctaacaaacctgtgactataccagaaaactctgaaataaagaccagtattgaagtcaaagccactgaaaactgtgctaaagaagctatttctgatgctgctttggaggccacagagaatgaaccacttaacaaggaaacagaagaaatgtgtgtgatgcttgtctctaatttgcctaataaaggatattctgtagaagaagtttatgacttagcaaaaccatttggtggtttaaaggatatcttgattttatcatctcataaaaaggcatatatagaaataaatagaaaagctgctgagtctatggtaaaattttatacctgcttcccagtattgatggatggaaatcaactctcaataagtatggctcctgaaaacatgaatataaaagatgaggaagctatatttataaccttggtaaaagaaaatgacccagaggcaaacatagatacaatctatgatcgatttgtacatcttgataatttaccggaagatggacttcagtgtgtactttgtgttggacttcagtttggaaaagtggatcaccatgtattcataagtaatagaaataaggcaattcttcagttagatagtcctgaatctgctcagtcaatgtatagctttctgaaacaaaatccacaaaatattggtgaccatatgttgacctgctcattatctccaaagatagacttaccagaggtgcaaattgagcatgacccagaattagaaaaagaaagccctggcttgaaaaacagtccaattgatgaaagtgaggtgcaaacagcaactgatagtccctctgttaaacctaatgagcttgaagaagaaagtactcccagcattcaaacagaaactttggtacagcaggaagagccttgtgaggaagaagctgaaaaagcaacatgtgattctgactttgctgttgaaactttggagcttgaaactcaaggagaggaggtcaaagaagaaattcctcttgtagcatccgcttcagtcagtattgaacaattcactgaaaatgccgaggagtgtgctttaaatcagcagatgtttaacagtgacttggagaagaaaggggcagaaattattaaccctaaaacagcattgttaccatctgacagtgtgtttgcagaagaaaggaacctcaaaggaattctagaagaatctccatctgaagcagaagatttcatttctggaattacacagactatggtagaagctgtagctgaagtagaaaaaaatgaaactgtttcggaaatattgccatcaacttgtattgtgacgttagtaccaggaattcccactggggatgagaagacagtggacaaaaagaatatttctgaaaaaaaaggtaacatggatgaaaaggaggagaaggaatttaatactaaggaaaccagaatggatcttcaaataggaacagagaaggctgaaaagaatgaaggtaggatggatgcagaaaaggtggaaaagatggcagcaatgaaagaaaagcctgcagaaaacactttattcaaggcatacccaaataaaggagtgggtcaggctaataagcctgatgaaactagtaaaactagtattctggctgtatcagatgtatctagcagtaaaccaagcatcaaggctgttatagtctcttctcctaaggcaaaagctacagtttcaaaaactgaaaatcagaaaagttttccaaaatctgtgcccagagatcaaataaatgctgaaaagaaactttcagccaaggaatttggtctgcttaaacccacaagtgccaggtcaggcttggcagaaagcagcagtaaattcaaacctactcagagcagtcttaccagaggaggcagtggaaggatctcagccctgcaaggcaagctttctaaactggattacagagatataacaaaacaatctcaggaaacagaggctagaccttccatcatgaaacgggatgacagcaacaataagactttggctgagcaaaacactaagaatcctaaaagcactactggtagaagttccaaatctaaagaggagccattatttccatttaatttggatgaatttgttactgtggatgaggttatagaagaagtgaatccttctcaggccaagcagaatccactaaagggaaaaaggaaagaaactctcaaaaatgttcctttctctgaacttaacttaaagaagaaaaaggggaaaacttccactcctcgtggtgttgagggagaactatcttttgtgacattggatgagattggggaagaggaagatgcagctgcacatctagcacaagctctagtcactgtggatgaagtaattgatgaagaagaactaaatatggaagaaatggtaaaaaattcaaattcactttttacattagatgaattaattgaccaagatgattgcatttcccacagtgaacctaaagatgttactgttctgtcagtggctgaagaacaagatctcctcaaacaggaacgcttggtaactgtggatgaaattggagaagtggaagagctacctttgaatgagtcagcagacataacttttgccactttaaatactaaaggaaatgaaggagatactgtaagggattccattggcttcatttcttctcaggtgcccgaagacccttctactttagttactgtagatgaaatacaagatgacagcagtgatttgcatttagtgactttggatgaagtaactgaagaggatgaagactctctggcggattttaacaaccttaaagaagagcttaattttgttactgttgatgaagttggagaggaggaagatggagataatgatttaaaagttgagttagcacaaagcaaaaatgaccatcccacagataaaaaaagggaatagaaagaagagagctgtggacacaaaaaagacaaaacttgaatccttgtcccaagtgggtccagtaaatgagaatgttatggaagaagatctaaaaaccatgattgaaagacacttaacagctaaaactccaaccaagagagttagaattgggaaaactctgccatcagaaaaagctgttgtgacagaaccagcaaaaggtgaagaggccttccagatgagtgaagttgatgaggaatctggattaaaggattcagaaccagagcgaaaacgcaagaagactgaagactcttcttcaggcaaatcagtggcgtctgatgtccctgaggaattagactttcttgtacctaaggctggattcttctgtccaatttgttccctcttctactcaggtgaaaaagcaatgacaaatcactgcaagagtacacgtcataagcaaaatactgagaaattcatggccaagcaaagaaaggaaaaggagcagaatgaggctgaagaaagaagctctaggtgattgggggaaaggaaagaattcactagaaatttgtttagggtccagttgatttgtgtatttttgttatcatttaatttgtaattttcgtttcagaagcaaatattcgtgttgtacaaatttctgattgccctaaatgtagagagactgatggggcaatcagaaatttgtacaacacgaattttcgtttcagaagcaaatattcgtgttgtacaaatttctgattgccctaaatgtagagagactgatggggaaagtatgatgggtttgatttttatatcaaatcatcaggcatggagaaatatcttttagaagtgttaaaat

SEQ ID NO: 96 - DNA, 3389 bp, Homo sapiens
  misc_feature: Template ID: 902614.15
  unsure 97, 1662: a, t, c, g, or other
gcggccgcggaccccaacgccgcgtgggccgcctactactcacactactaccagcagcccccggcacccgtccccggccccgcaccggcccctggcngctaccaccggctcagggccagcagccccagcagcccggagcgcccccacagcaggactacacgaaggcttgggaggagtactacaagaagcaagcgcaagtggccaccggagggggtccaggagctcccccaggctcccagccagactacagtgccgcctgggcggaatattacagacagcaggccgcttactacggacagaccccaggtcctggcggcccccagccgccgcccacgcagcagggacagcagcaggcaagtgggaattgccaccctcctcctcctcctttctccttccaacccccggccaccgtccatcctgccttagtgggtagcgccggaaaccccttcccctgcggggtgtgcccttgatgcctgcagcgggggccgtgtggccggaggtctccgggagtccccacgcaccgccagggaagcattcgctgggtccagaggttaaacgaagaggcctccctgcgccggctgcttgttcctgtgtgccgctgtcgtgatgctggggagcgctgagactcgcaggcgggacttctgaactgctggggagtcggggggcaggcagacagcgcggacggtgggcaccggcccggccgccaccacctcgctcacaatctggccacttgggaagaaaacgtctattttttccccttctctgcatcacttttttggtttttgttctttttattcttttattttttaaacccatgatcttttttcctgtgtccaagtgactgtgttgcaggcggcccggctctggcagggactggtggggacgcggggagcggcccaggcccctgccccgccgggctcagcctcccatgcgctcgcgcttgcctgtgtcccgggcttgtctgtgaagtgggcgtgaagatcgttgccaccttccaacctacctcacaggggtgttgtggggacaccatgatctctggattgttcatgtcgtcgtgctgcgccgggagccaccgccctccggagacagggcagctcccctacgaccctagcgcctccgccctccgcggcccctctcctctcttcctgctctgtccctccttctccatcagggagcagcgtgacttcagcgagtcccgcgagcacctggctagacagttaacaagcacgtccttccagcctgagccagcgcaggtttgggagggggcttcctggccccccccacggtgttccagcccctcctctcttccgccccctagtctcccacccttccctccccgtagtgaccaattcctatctcttccctctccgcaggctcaatgaatcgaatgaatgtgaacttcttcatctgtgaaaaatcttttttttttccattttgttctgtttgggggcttctgttttgtttggcgagagagcgatggctgccgtggggagtactggggagccctcgcggcaagcagggtgggggggacttgggggcatgccgggccctcactctctcgcctgttctgtgtctcacatgctttttctttcaaaattgggatccttccatgttgagccagccagagaagatagcgagatctaaatctctgccaaaaaaaanaaaaaagaagccaacactaaaccacaaatatacaacaaggccattttctcaaacgagagtcagcctttaacgaaatgaccatggttgacacagagatgccattctggcccaccaactttgggatcagctccgtggatctctccgtaatggaagaccactcccactcctttgatatcaagcccttcactactgttgacttctccagcatttctactccacattacgaagacattccattcacaagaacagatccagtggttgcagattacaagtatgacctgaaacttcaagagtaccaaagtgcaatcaaagtggagcctgcatctccaccttattattctgagaagactcagctctacaataagcctcatgaagagccttccaactccctcatggcaattgaatgtcgtgtctgtggagataaagcttctggatttcactatggagttcatgcttgtgaaggatgcaagggtttcttccggagaacaatcagattgaagcttatctatgacagatgtgatcttaactgtcggatccacaaaaaaagtagaaataaatgtcagtactgtcggtttcagaaatgccttgcagtggggatgtctcataatgccatcaggtttgggcggatgccacaggccgagaaggagaagctgttggcggagatctccagtgatatcgaccagctgaatccagagtccgctgacctccgggccctggcaaaacatttgtatgactcatacataaagtccttcccgctgaccaaagcaaaggcgagggcgatcttgacaggaaagacaacagacaaatcaccattcgttatctatgacatgaattccttaatgatgggagaagataaaatcaagttcaaacacatcacccccctgcaggagcagagcaaagaggtggccatccgcatctttcagggctgccagtttcgctccgtggaggctgtgcaggagatcacagagtatgccaaaagcattcctggttttgtaaatcttgacttgaacgaccaagtaactctcctcaaatatggagtccacgagatcatttacacaatgctggcctccttgatgaataaagatggggttctcatatccgagggccaaggcttcatgacaagggagtttctaaagagcctgcgaaagccttttggtgactttatggagcccaagtttgagtttgctgtgaagttcaatgcactggaattagatgacagcgacttggcaatatttattgctgtcattattctcagtggagaccgcccaggtttgctgaatgtgaagcccattgaagacattcaagacaacctgctacaagccctggagctccagctgaagctgaaccaccctgagtcctcacagctgtttgccaagctgctccagaaaatgacagacctcagacagattgtcacggaacacgtgcagctactgcaggtgatcaagaagacggagacagacatgagtcttcacccgctcctgcaggagatctacaaggacttgtactagcagagagtcctgagccactgccaacatttcccttcttccagttgcactattctgagggaaaatctgacacctaagaaatttactgtgaaaaagcattttaaaaagaaaaggttttagaatatgatctattttatgcatattgtttataaagacacatttacaatttacttttaatattaaaaattaccatattatgaaaaaaaaaaaaaaaggggccca

SEQ ID NO: 97 - DNA, 3351 bp, Homo sapiens
  misc_feature: Template ID: 995119.1
ggctggataagggctcagagttgcactgagtgtggctgaagcagcgaggcgggagtggaggtgcgcggagtcaggcagacagacagacacagccagccagccaggtcggcagtatagtccgaactgcaaatcttattttcttttcaccttctctctaactgcccagagctagcgcctgtggctcccgggctggtgtttcgggagtgtccagagagcctggtctccagccgcccccgggaggagagccctgctgcccaggcgctgttgacagcggcggaaagcagcggtacccacgcgcccgccgggggaagtcggcgagcggctgcagcagcaaagaactttcccggctgggaggaccggagacaagtggcagagtcccggagcgaacttttgcaagcctttcctgcgtcttaggcttctccacggcggtaaagaccagaaggcggcggagagccacgcaagagaagaaggacgtgcgctcagcttcgctcgcaccggttgttgaacttgggcgagcgcgagccgcggctgccgggcgccccctccccctagcagcggaggaggggacaagtcgtcggagtccgggcggccaagacccgccgccggccggccactgcagggtccgcactgatccgctccgcggggagagccgctgctctgggaagtgagttcgcctgcggactccgaggaaccgctgcgcccgaagagcgctcagtgagtgaccgcgacttttcaaagccgggtagcgcgcgcgagtcgacaagtaagagtgcgggaggcatcttaattaaccctgcgctccctggagcgagctggtgaggagggcgcagcggggacgacagccagcgggtgcgtgcgctcttagagaaactttccctgtcaaaggctccggggggcgcgggtgtcccccgcttgccagagccctgttgcggccccgaaacttgtgcgcgcagcccaaactaacctcacgtgaagtgacggactgttctatgactgcaaagatggaaacgaccttctatgacgatgccctcaacgcctcgttcctcccgtccgagagcggaccttatggctacagtaaccccaagatcctgaaacagagcatgaccctgaacctggccgacccagtggggagcctgaagccgcacctccgcgccaagaactcggacctcctcacctcgcccgacgtggggctgctcaagctggcgtcgcccgagctggagcgcctgataatccagtccagcaacgggcacatcaccaccacgccgacccccacccagttcctgtgccccaagaacgtgacagatgagcaggagggcttcgccgagggcttcgtgcgcgccctggccgaactgcacagccagaacacgctgcccagcgtcacgtcggcggcgcagccggtcaacggggcaggcatggtggctcccgcggtagcctcggtggcagggggcagcggcagcggcggcttcagcgccagcctgcacagcgagccgccggtctacgcaaacctcagcaacttcaacccaggcgcgctgagcagcggcggcggggcgccctcctacggcgcggccggcctggcctttcccgcgcaaccccagcagcagcagcagccgccgcaccacctgccccagcagatgcccgtgcagcacccgcggctgcaggccctgaaggaggagcctcagacagtgcccgagatgcccggcgagacaccgcccctgtcccccatcgacatggagtcccaggagcggatcaaggcggagaggaagcgcatgaggaaccgcatcgctgcctccaagtgccgaaaaaggaagctggagagaatcgcccggctggaggaaaaagtgaaaaccttgaaagctcagaactcggagctggcgtccacggccaacatgctcagggaacaggtggcacagcttaaacagaaagtcatgaaccacgttaacagtgggtgccaactcatgctaacgcagcagttgcaaacattttgaagagagaccgtcgggggctgaggggcaacgaagaaaaaaaataacacagagagacagacttgagaacttgacaagttgcgacggagagaaaaaagaagtgtccgagaactaaagccaagggtatccaagttggactgggttgcgtcctgacggcgcccccagtgtgcacgagtgggaaggacttggcgcgccctcccttggcgtggagccagggagcggccgcctgcgggctgccccgctttgcggacgggctgtccccgcgcgaacggaacgttggacttttcgttaacattgaccaagaactgcatggacctaacattcgatctcattcagtattaaaggggggagggggagggggttacaaactgcaatagagactgtagattgcttctgtagtactccttaagaacacaaagcggggggagggttggggaggggcggcaggagggaggtttgtgagagcgaggctgagcctacagatgaactctttctggcctgccttcgttaactgtgtatgtacatatatatattttttaatttgatgaaagctgattactgtcaataaacagcttcatgcctttgtaagttatttcttgtttgtttgtttgggtatcctgcccagtgttgtttgtaaataagagatttggagcactctgagtttaccatttgtaataaagtatataatttttttatgttttgtttctgaaaattccagaaaggatatttaagaaaatacaataaactattggaaagtactcccctaacctcttttctgcatcatctgtagatactagctatctaggtggagttgaaagagttaagaatgctcgataaaatcactctcagtgcttcttactattaagcagtaaaaactgttctctattagacttagaaataaatgtacctgatgtacctgatgctatgtcaggcttcatactccacgctcccccagcgtatctatatggaattgcttaccaaaggctagtgcgatgtttcaggaggctggaggaaggggggttgcagtggagagggacagcccactgagaagtcaaacatttcaaagtttggattgcatcaagtggcatgtgctgtgaccatttataatgttagaaattttacaataggtgcttattctcaaagcaggaattggtggcagattttacaaaagatgtatccttccaatttggaatcttctctttgacaattcctagataaaaagatggcctttgtcttatgaatatttataacagcattctgtcacaataaatgtattcaaataccaataacagatcttgaattgcttccctttactacttttttgttcccaagttatatactgaagtttttatttttagttgctgaggtt

SEQ ID NO: 98 - DNA, 5532 bp, Homo sapiens
  misc_feature: Template ID: 999437.3
  unsure 4294-4622: a, t, c, g, or other
gccggctccagttagagctcgggtctcctcgccacagctccgagtctttcgttctgggaggcccaggccggcttcggcgttctgagaataaacagaacctctgttgctctgcgacttgcaggcactgggagattcgtagctaagacgccagggcatcccggaagctgggaaatgggactgttgacattcagggatgtggccgtagaattctctttggaggagtgggaacacctggaaccagctcagaagaatttgtatcaggatgtgatgttagaaaactacagaaacctggtctctctgggtcttgttgtctctaagccggacctgatcacctttttggaacaaaggaaagagccttggaatgtgaagagtgaggagacagtagccatccagccagatgtgttttcgcattataacaaggacctgttgacagagcactgcacagaagcttcattccaaaaagtgatatcgaggagacatgggagctgtgatcttgagaatttacatttaagaaaaaggtggaaaagggaggagtgggaagggcacaatggatgttatgatgaaaagacttttaaatatgatcaatttgatgaatcctctgttgaaagtttgtttcaccagcaaatactttcttcttgtgccaaaagctataactttgatcaatataggaaggtctttactcattcatcattgcttaatcaacaagaggaaatagatatttggggaaaacatcacatatatgataaaacttcagtgttatttaggcaggtctctactctaaatagttaccgaaatgtttttattggagagaaaaattatcattgcaataattctgaaaaaaccttgaaccaaagctcaagccctaaaaatcatcaggaaaattattttctagaaaaacaatacaaatgtaaagaatttgaggaagtctttcttcagagtatgcatgggcaagagaaacaagaacagtcttacaaatgtaataaatgtgtagaagtttgtacccagtcattaaaacatattcaacatcagaccatccatatcagagaaaactcatatagctataacaaatatgataaagatcttagtcagtcatcaaatcttagaaagcagataatccataatgaagagaaaccatacaaatgtgaaaaatgtggggatagcttaaaccatagtttgcaccttactcaacatcagatcattcctaccgaagagaaaccctataaatggaaagaatgtggcaaggtctttaaccttaactgtagtttataccttactaaccataagaaaattcatgctggagagaaaccttacgaatgtaaagaatgtggaaaagccttcagtaggaaggaaaatcttattacacatcagaaaattcatactggggaaaaaccgtataagtgtaatgaatgtggaaaagctttcattcagatgtcaaaccttattagacaccacagaattcatactggggagaaaccttatgcatgtaaggattgttggaaagccttcagtcagaaatcaaatctcattgaacatgagcgaattcacactggagagaaaccctatgaatgtaaggaatgtgggaaatccttcagccagaagcaaaatcttattgagcacgagaaaattcatactggggagaaaccttataaatgtaatgaaggtggcaaagcttttaactggtcctcaacccttactcaacatcggaaaattcatactggagaaaatctttacaaatgcaaagtatgtgctaaagccttttacttgtttctcaaatcttattgtgcatgagagaattcatactggagagaaaccctataaatgtaaagaatgtggcaaagcctttccttatagttcacaccttattcgacatcatcgaattcatactggagaaaaaccatacaaatgtaaagcatgtagcaaatcttttagtgactcctcaggtcttactgtgcatcggcgaattcatactggagagaaacgctacaaatgtaaagaatgtggaaaatcttttaaccaatcctcaatccatagtaagtataagagaattcatactggagataaaccctacaaatgtgaagaatgtggcaaagccttctaccaattctcataccttactacacataagctaattcatactggagagaaaccctacaaatgtgaagaatgtggcaaaacttttaactctaggtcatacctcactacacatcggagaagacatactggagagagaccctacaaatgtgatgaatgtggtaaagccttcagctataggtcatacctcactacacatcggagaagtcatagtggagagagaccctacaaatgtgaagaatgtggcaaagcctttaaccagtcctcaaaccttattgaacaaagtaattcatactggagagaaaccctacaaatgtgaagaatgtggcaaagcctctaacccgtcctgaattcttactaaacataagagaattcatactggagaggaaccctacaaatgttaagaatgtggcataacctttactcaaggctcacatcttactatacatcagagaattcacactggggagaagccgtacgaatgtcgggaatgtgggaaaaggcttttaagtggttctcggccctaactatacataagataattcatactggaaataaaccatttaaatgtgatgaatgtgggaaaacttttacccaatcctacaaaccttactacacatcagagagtccatactggagagaaaccctacaaatgtaaagaatgtggcaagcatttaccaggagctcacaccttattcaacatcagagaattcacacaggagagaaaccctacaagtgtacagaatgtggcaaagcttttaacagacgctctaaccttactatacatcaaataattcataccaggagagaaaccctacaaatgtgaagaatgtgctaaaaccctaaactggtgctcacaccttactcaacattagaaaatcaatactggatagaaaccctacagatgtagagaatgtggcaaagcttttaaccattccacaacccttttttcacatgagaaaattcatactggagagaaaccctacaaatgtgatgaatgtggcaaaacctttacctggccctcaatcctctccaaacataaaagaactcatactggagagaaaccctacaaatgtgaagaatgtggcaaatcctttactgcatcctcaactctaactacacataagagaattcatactggagagaaaccttacaaatgtgaagaatgtggcaaagcttttaactggtcctcagccctcactaaacataagagaattcatattgaacgaaaaccctacatagtgaagaaagtggcaaatcctttaactgatcctcaacttttactaaacataaggtaattcatactgggagaaaagccatacaaatgagaagaatgtggcaatgcctttaatcagtcctcacaccttaatacacataagataattaatgctggagaggaactctatagttgtgaagaatgtggcaaagattttaaccaatcctcataccttactatacagaaattcacactggtgagaaatcctttggatgtaatgaatatggaaaagctttaaccttccttaacccttaactgaagatcagataatgcatgctggggaaaagccctataaatgtcaagaatgtggcaaagcttttaactgattctcaactcttactacatgtaagagtatttatactggaaagaaaccctacaaatgtaaaaaacgtggcaatgcctttaactggtcctcacaccttgctacatataagacagtttatactttgagagaaaccctgcaaatgtgaataatgtggcaatactttaaaccaatcctcaaacctcactaaacataagataatactgaaaactttacaaacctgaatgatgtgacaataattttgacaacacctcgaactttctaacataaatcatactggtgaaaaatcctagaaatgtgaaaaatatcacaaagtcattaaatggttgtcacacttgattgtaggtaagaatccatactgaagaaaactcctggaagtgtaaaaaatgtggcaacacttttaataaatgctcaccccttattgcacaggaaagcatttatacttcagaaagattgtacaaatacaaggaatgtggaaaagccattattatctgctcagattttactcaacattagagagttagtacgtaataaaagcattataaatgcaatttttgtcaagagatctttcagaaaatataagcctttaaagtgaagaagaggannnnnnnnnnnnnnnnnnnnnnnnnnnnnnnnnnnnnnnnnnnnnnnnnnnnnnnnnnnnnnnnnnnnnnnnnnnnnnnnnnnnnnnnnnnnnnnnnnnnnnnnnnnnnnnnnnnnnnnnnnnnnnnnnnnnnnnnnnnnnnnnnnnnnnnnnnnnnnnnnnnnnnnnnnnnnnnnnnnnnnnnnnnnnnnnnnnnnnnnnnnnnnnnnnnnnnnnnnnnnnnnnnnnnnnnnnnnnnnnnnnnnnnnnnnnnnnnnnnnnnnnnnnnnnnnnnnnnnnnnnnnnnnnnnnnnnnnnnnnnnnnnnnnnnnnnnnnnnnnnnnnnnnnntacaaatacgaagagggttgtagtacctttacttgtatcacagatacttttgtacccattttgcactagaggaaaaccatgaagcagttgctcaaatgttgttcaacaccagaaaatttatattggagaaaagcactgtaaatgtaatgcatttgtgaaaacattttttaaaaaactacagcttagaaaataccagaggcctcatactaaaatatatttttgcaagtgaagtaaatataaaaataatttaatccaaaattaagtctatataaatatcagagaattcacagtagaaatatctaaggtactgacacttcagacattgctgagtatagaatcagaatgctgagtatagaaaataatttaaaactaaagttggtaggtaaataatgtgtatataactttaaaagaagtagaatttttttgtagatgtataattacattcaaattatattttttcttgaaaaattagtttttgaaaagcaaataatgatgtaattcaactcaaattcatgctcttcattcctattgtattcacatgtgaaagcatgtgattaatttttcatgcatcaaagatatgagaaatcatttctgttaggtcggtattatttatgacactttctatgaaagaataaggacattaaaatgtaagatgcatgatgaaaacctgagtgaagaggctgtttgtgtttaacttataatattgagtgatccatgaagtaggttttcagagcaatattcttctgcattatagtaagagaaaaccatttttaatcttagttaaaattaaagtgaattagtagtatatcattttactatttgtacttttatgtaataaaatgcaatgtgtttaaaaatttttggattatgcgtgaacttagttttttaattaaactttttttaacatgtt

SEQ ID NO: 99 - DNA, 237 bp, Homo sapiens
  misc_feature: Template ID: 1225522.1
gagggaacatgctgagaaactgatgaagctgcagaaccaacgaggtggccgaatcttccttcaggatatcaagaaaccagactgtgatgactgggagagcgggctgaatgcaatggagtgtgcattacatttggaaaaaaatgtgaatcagtcactactggaactgcacaaactggccactgacaaaaatgacccccatttgtgtgacttcattgagacacattacctgaatgagca

SEQ ID NO: 100 - DNA, 8731 bp, Homo sapiens
  misc_feature: Template ID: 235447.5
ggcggctcgggacggaggacgcgctagtgtgagtgcgggcttctagaactacaccgaccctcgtgtcctcccttcatcctgcggggctggctggagcggccgctccggtgctgtccagcagccatagggagccgcacggggagcgggaaagcggtcgcggccccaggcggggcggccgggatggagcggggccgcgagcctgtggggaaggggctgtggcggcgcctcgagcggctgcaggttcttctgtgtggcagttcagaatgatggatcaagctagatcagcattctctaacttgtttggtggagaaccattgtcatatacccggttcagcctggctcggcaagtagatggcgataacagtcatgtggagatgaaacttgctgtagatgaagaagaaaatgctgacaataacacaaaggccaatgtcacaaaaccaaaaaggtgtagtggaagtatctgctatgggactattgctgtgatcgtctttttcttgattggatttatgattggctacttgggctattgtaaaggggtagaaccaaaaactgagtgtgagagactggcaggaaccgagtctccagtgagggaggagccaggagaggacttccctgcagcacgtcgcttatattgggatgacctgaagagaaagttgtcggagaaactggacagcacagacttcaccggcaccatcaagctgctgaatgaaaattcatatgtccctcgtgaggctggatctcaaaaagatgaaaatcttgcgttgtatgttgaaaatcaatttcgtgaatttaaactcagcaaagtctggcgtgatcaacattttgttaagattcaggtcaaagacagcgctcaaaactcggtgatcatagttgataagaacggtagacttgtttacctggtggagaatcctgggggttatgtggcgtatagtaaggctgcaacagttactggtaaactggtccatgctaattttggtactaaaaaagattttgaggatttatacactcctgtgaatggatctatagtgattgtcagagcagggaaaatcacctttgcagaaaaggttgcaaatgctgaaagcttaaatgcaattggtgtgttgatatacatggaccagactaaatttcccattgttaacgcagaactttcattctttggacatgctcatctggggacaggtgacccttacacacctggattcccttccttcaatcacactcagtttccaccatctcggtcatcaggattgcctaatatacctgtccagacaatctccagagctgctgcagaaaagctgtttgggaatatggaaggagactgtccctctgactggaaaacagactctacatgtaggacggtaacctcagaaagcaagaatgtgaagctcactgtgagcaatgtgctgaaagagataaaaattcttaacatctttggagttattaaaggctttgtagaaccagatcactatgttgtagttggggcccagagagatgcatggggccctggcagctgcaaaatccggtgtaggcacagctctcctattgaaacttgcccagatgttctcagatatggtcttaaaagatgggtttcagcccagcagaagcattatctttgccagttggagtgctggagactttggatcggttggtgccactgaatggctagagggatacctttcgtccctgcatttaaaggctttcacttatattaatctggataaagcggttcttggtaccagcaacttcaaggtttctgccagcccactgttgtatacgcttattgagaaaacaatgcaaaatgtgaagcatccggttactgggcaatttctatatcaggacagcaactgggccagcaaagttgagaaactcactttagacaatgctgctttccctttccttgcatattctggaatcccagcagtttctttctgtttttgcgaggacacagattatccttatttgggtaccaccatggacacctataaggaactgattgagaggattcctgagttgaacaaagtggcacgagcagctgcagaggtcgctggtcagttcgtgattaaactaacccatgatgttgaattgaacctggactatgagaggtacaacagccaactgctttcatttgtgagggatctgaaccaatacagagcagacataaaggaaatgggcctgagtttacagtggctgtattctgctcgtggagacttcttccgtgctacttccagactaacaacagatttcgggaatgctgagaaaacagacagatttgtcatgaagaaactcaatgatcgtgtcatgagagtggagtatcacttcctctctccctacgtatctccaaaagagtctcctttccgacatgtcttctggggctccggctctcacacgctgccagctttactggagaacttgaaactgcgtaaacaaaataacggtgcttttaatgaaacgctgttcagaaaccagttggctctagctacttggactattcagggagctgcaaatgccctctctggtgacgtttgggacattgacaatgagttttaaatgtgatacccatagcttccatgagaacagcagggtagtctggtttctagacttgtgctgatcgtgctaaattttcagtagggctacaaaacctgatgttaaaattccatcccatcatcttggtactactagatgtctttaggcagcagcttttaatacagggtagataacctgtacttcaagttaaagtgaataaccacttaaaaaatgtccatgatggaatattcccctatctctagaattttaagtgctttgtaatgggaactgcctctttcctgttgttgttaatgaaaatgtcagaaaccagttatgtgaatgatctctctgaatcctaagggctggtctctgctgaaggttgtaagtggtcgcttactttgagtgatcctccaacttcatttgatgctaaataggagataccaggttgaaagaccttctccaaatgagatctaagcctttccataaggaatgtagctggtttcctcattcctgaaagaaacagttaactttcagaagagatgggcttgttttcttgccaatgaggtctgaaatggaggtccttctgctggataaaatgaggttcaactgttgattgcaggaataaggccttaatatgttaacctcagtgtcatttatgaaaagaggggaccagaagccaaagacttagtatattttcttttcctctgtcccttcccccataagcctccatttagttctttgttatttttgtttcttccaaagcacattgaaagagaaccagtttcaggtgtttagttgcagactcagtttgtcagactttaaagaataatatgctgccaaattttggccaaagtgttaatcttaggggagagctttctgtccttttggcactgagatatttattgtttatttatcagtgacagagttcactataaatggtgtttttttaatagaatataattatcggaagcagtgccttccataattatgacagttatactgtcggttttttttaaataaaagcagcatctgctaataaaacccaacagatactggaagttttgcatttatggtcaacacttaagggttttagaaaacagccgtcagccaaatgtaattgaataaagttgaagctaagatttagagatgaattaaatttaattaggggttgctaagaagcgagcactgaccagataagaatgctggttttcctaaatgcagtgaattgtgaccaagttataaatcaatgtcacttaaaggctgtggtagtactcctgcaaaattttatagctcagtttatccaaggtgtaactctaattcccattttgcaaaatttccagtacctttgtcacaatcctaacacattatcgggagcagtgtcttccataatgtataaagaacaaggtagtttttacctaccacagtgtctgtatcggagacagtgatctccatatgttacactaagggtgtaagtaattatcgggaacagtgtttcccataattttcttcatgcaatgacatcttcaaagcttgaagatcgttagtatctaacatgtatcccaactcctataattccctatcttttagttttagttgcagaaacattttgtggtcattaagcattgggtgggtaaattcaaccactgtaaaatgaaattactacaaaatttgaaatttagcttgggtttttgttacctttatggtttctccaggtcctctacttaatgagatagtagcatacatttataatgtttgctattgacaagtcattttaactttatcacattatttgcatgttacctcctataaacttagtgcggacaagttttaatccagaattgaccttttgacttaaagcagagggactttgtatagaaggtttgggggctgtggggaaggagagtcccctgaaggtctgacacgtctgcctacccattcgtggtgatcaattaaatgtaggtatgaataagttcgaagctccgtgagtgaaccatcattataaacgtgatgatcagctgtttgtcatagggcagttggaaacggcctcctagggaaaagttcatagggtctcttcaggttcttagtgtcacttacctagatttacagcctcacttgaatgtgtcactactcacagtctctttaatcttcagttttatctttaatctcctcttttatcttggactgacatttagcgtagctaagtgaaaaggtcatagctgagattcctggttcgggtgttacgcacacgtacttaaatgaaagcatgtggcatgttcatcgtataacacaatatgaatacagggcatgcattttgcagcagtgagtctcttcagaaaacccttttctacagttagggttgagttacttcctatcaagccagtacgtgctaacaggctcaatattcctgaatgaaatatcagactagtgacaagctcctggtcttgagatgtcttctcgttaaggagatgggccttttggaggtaaaggataaaatgaatgagttctgtcatgattcactattctagaacttgcatgacctttactgtgttagctctttgaatgttcttgaaattttagactttctttgtaaacaaatgatatgtccttatcattgtataaaagctgttatgtgcaacagtgtggagattccttgtctgatttaataaaatacgacattttattttcacttatggacatacagtacatgaatttagaaataaaatcgtcgcaggattctgaaatactgataccttaagatctaacacactgatattagtccattccctacaaagcagccacattagcagttcagatttggtctttgttgtagctgttgacattaagttctttaagtgaaatgcccagcagcatttaaataatattttacagcagacatgaactaagtttcaatattccatctttggaacaaattatgcttatttacatgttaacaggtggctatatttacttaccctattgtgagtttaatgactgattttaaactacagagggttttccagctattatttcctttagtttctaaaagtaacgacttatattaatgttttataaaagatagtgatgaaaaaaaggtaatgctgaaataaaggcgcttttagaaatatttaaggacaacataaggtattaatattggaaaaaaactgtacatattttcaagcacaacactgaaatattgcagcagtgtttaactgaattgttttaaaatagtggtaattatactaccttacataccgttctaatatttaaatctcttaattacaatttgaatatacaatctgacttacaattagaactatgcacagtttccgaagcatatttttcaggtttgtttttgcacaaaaattaacgtttaagttggtccttgatttggagtactataactacctggaagcactaagttttagacacattcattgatagccaacaaaatccttgacagagtgaaaaacatcaagagtaccatgcgtgaaaaagcagctgttaccctccaagtgcaatatgaaatctagaacaagaccctctcagaggcctgcgtgtctcaatgagtgaccctcaaagaaaccaaaatgtataggaggaagtagctgaccagtcatgggcatcttccacattgggataatctttaaaacagaggcagctttggacctctagcgtaagagatagactttacattctttgattttatttacacttttttaaaaagataaagtatatctgaattctctcatcacacctaaactgctggtgcactggcagttcaagctgattaaagtcatgaggcagcccaccagagactttaaagaaccccagacctcatcctcctctttcctatcatgaagtcacagactgtctcatcaaactacttgatgtctgtaagagacttacattttataaacacagttagcttattactgaacttttaagaaaagtccaaagatgtgtggaaaagtatgcctgctaatagtgaccgcttctacaatgacaataatgaaactgagctacaaaaataattttgctgttttaaataatgaaaggagctaggtttttaaaatatattacttattctgcaacagctaattaaattgacaatcaatagaatacaatgaacagattcagcttccattctgcaagctgaattcaggttatattttaattacagaatagcttcaaattataaatctaactgtcccaatagtaaagagaccatcaaggcagtaacatcagatcaattctgtcatcatcctgcatggagcacaagatgtgcttttggataaaggcattaaaaagaccttgggctgatgtggaaagcgggtcagtaaagactccagttctgcacaatggaatcttccaagccaagccgctttccacaaatacaaattcagtctatcttttctttctggaccagtctgggagcatcgacaaaatctttgccattgtaaagaatgataaaaaatgttccaatgcttgcaactccccagaagagcacataggccagtgtttctgtccaagtgtcaccagccataagcaaacagataatgcacattgaaaaggcaacaaccatgataataggcaaagccaggaatttccagtcccttggaacacttaaaggactatgagattctaattcatccactgaatagtttccaagaaataagtctatggaatcttgtctaaatccatcggaaaagttgttcttataatatcgtatcattgagttccagccatccattataagtcccaaatgagttctctttccagttctggtaaagtcagtcttcaaggcaccagttcccgcatattgcttggcacaagcatttgcgttgtcagcccaggcatttttgaaaatcttctcaaattcatcttgttcttcaagcttttgtcccacatgcaaaactcctagtctctgaagttgggcctgaagtgaacgacgagctaacaaactctggatcacattggttctatctagacaaacatgcaattgcttcggaacacgccttcctggtttgccaccacctggccagcagagtccactagaaaataacttaattcatcttgcatttctgctacctgatccaataaaatacttagtcgatcccatctcatatttttacattccttatggaagtcaaaggcaatgtatctcatcattccacttcccaaggaagacaccattgttgcaaatgtctgctcaagtggcttctccgagcccttctggttaatcagattgattataacttgttttccataaataattacttgggaatcaaaatgcctttggaaaccgtccatgtgatttgctactttgctgatctgtggcagtggtttgtacttgaggtttggtctttgggaccagaaaacaggtattgatcctcgagtctgtacaaacgaagctttgctcccattgtagtgcacaatttgttctgtttctacaaagttagctgcatggccttccgaatcaattcctcttacataatagcgcacaccagctctgaaacagctcctcctcgagatgagaatccaatcaaagtattttccattaatagaacatgaatgcatggtaataaagccatgtaacactggaagggcaaaccgatgaacctctggctgtgcagaaagttctcttagaagatgaccattccatacaaaccgctgatctgccctttccaagagactcatttcttggaattcaggactagtgttggatagccgctgcaaagtatgggtcaaatcatatgttgttgaaaagtaaaatccatccacattcaagacatggtttagcatcgctaggaaggttttattatcttgtaactgaatatcagttaagtgcaacattgtcttcttataagaaaggacatcaaaatctgttgctttccagactacatgactgaaaaattcacctacttttatctttttggtaatgactataagataattacctgccaccagatggattgtgcccagtataccaaatattggtcttgtgacagctgaaggaggaacatctttcttgactgcaagggtaacctctgtggacacacggtcaatggtaagtacgtcatctgctccatcatcacaagcttccacataaaatttttcaggtgtgatatgccagatattcccaggctgtggccaccagattttcaaacacagcttcagctgctcgtaggccgccgtcgccatcctgcac

SEQ ID NO: 101 - DNA, 1576 bp, Homo sapiens
  misc_feature: Template ID: 139899.22
  unsure 1461, 1544-1545: a, t, c, g, or other
cttcagcatcttccgctcatcttctcccaccagagagactgagcgcccagccctgccagcacgtgctgttcgccccacccggtggacataatgtttgatggtattaggcattgtgaagttgattaccgttttgaccccctcaatgtcaagtccacgggctgccacatcagtggccacgaggatgtcaatctgttcatccttaaaacgcctagaaacagtcacaaacagctgttcatccagacaccctcccctaataatgctccacaagagcctgagccagcagaggacagaacggtctgtctcttgcttcaacagtgtttggacggaacagatccggggactctcttccagcctccgaccgccctccgatttcctctccgcttgcaacctccgggaccatcttctcggccatctcctgcttctgggacctgccagcaccgtttttgtggttagctccttcttgccaaccaaccatgagctcccagattcgtcagaattattccaccgacgtggaggcagccgtcaacagcctggtcaatttgtacctgcaggctcggcctcctacacctacctctctctgggcttctatttcgaccgcgatgatgtggctctggcaggcctcctacacctacctctctctgggcttctatttcgaccgcgatgatgtggctctggaaggcgtgagccacttcttccgcgaactggccgaggagaagcgcgagggctacgagcgtctcctgaagatgcaaaaccagcgtggcggccgcgctctcttccaggacatcaagaagccagctgaagatgagtggggtaaaaccccagacgccatgaaagctgccatggccctggagaaaaagctgaaccaggcccttttggatcttcatgccctgggttctgcccgcacggacccccatctctgtgacttcctggagactcacttcctagatgaggaagtgaagcttatcaagaagatgggtgaccacctgaccaacctccacaggctgggtggcccggaggctgggctgggcgagtatctcttcgaaaggctcactctcaagcacgactaagagccttctgagcccagcgacttctgaagggccccttgcaaagtaatagggcttctgcctaagcctctccctccagccaataggcagctttcttaactatcctaacaagccttggaccaaatggaaataaagcttgttaggatagttaagaaagctgcctattggctggagggagaggcttaggcagaagccctattactttgcaaggggcccttcagaagtcgctgggctcagaaagctcttagtcgtgcttgagagtgagcctttcgaagagatactcgcccagcccagcctccgggccacccagcctgtggaggttggtcaggtggtcacccatcttcttgataagcttcacttcctcatctaggaagtgagtctccaggaatcacagagntgggggttccgtgcgggcagaacccagggcatgaagatccaaaagggcctggttcagctttttctccagggccatggcagctnncatggcgttctggggttttaccccactcatc

SEQ ID NO: 102 - DNA, 1935 bp, Homo sapiens
  misc_feature: Template ID: 977615.8
ctggactcagcttctttgcgtaaccaatactggaaggcatttaaaggcacctctgccgccacagaccttgcagttaactccgccctgacccacccttcccgatgcagtccctgatgcaggctcccctcctgatcgccctgggcttgcttctcgcggcccctgcgcaagcccacctgaaaaagccatcccagctcagtagcttttcctgggataactgtgatgaagggaaggaccctgcggtgatcagaagcctgactctggagcctgaccccatcgtcgttcctggaaatgtgaccctcagtgtcgtgggcagcaccagtgtccccctgagttctcctctgaaggtggatttagttttggagaaggaggtggctggcctctggatcaagatcccatgcacagactacattggcagctgtacctttgaacacttctgtgatgtgcttgacatgttaattcctactggggagccctgcccagagcccctgcgtacctatgggcttccttgccactgtcccttcaaagaaggaacctactcactgcccaagagcgaattcgttgtgcctgacctggagctgcccagttggctcaccaccgggaactaccgcatagagagcgtcctgagcagcagtgggaagcgtctgggctgcatcaagatcgctgcctctctaaagggcatatagcatggcatctgccacagcagaatggagcggtgtgaggaaggtcccttttcctctgttttgtgtttgccaaggccaaactcccactctctgcccccctttaatcccctttctacagtgagtccactaccctcactgaaaatcattttgtaccacttacattttaggctggggcaagcagccctgacctaagggagaatgagttggacagttcttgatagcccagggcatctgctgggctgaccacgttactcatccccgttaacattctctctaaagagcctcgttcatttccaaagcagttaaggaatgggaaccagagtgttttaggacctgaagaatctttatgactctctctctttcactcttttttttttttgtcactaagttaaaagcgaagtgagagtattaacgtttttgttctcctccggccccctgttacaatgaaggggcaaaagtatttgctcttagtctattcctcccttaacttctgtgactaatttttatttcctttctagatttgcccaattaatactagggtgcagtgtatcctggagaggtagggtgtgtgggggaggaatcccttgggggagatattaggagtgctctgttgtttacaaactcaggtacccgcagggcctagcaagagactctgtctcaaaaaaaaaaagtttcaatgtttactcctagagaagccaaaaatccagatttgtatatgaaatcttaccattttaaaagattggcagctaattatttttttaaaaagctgtgcagtgtgatgtgtcccaaacggactggctcatgggtggccacgtcacaacctctgatctcagaccgtgcatgccttgtcctcttaagacaactcctgtggcaccgtttctccctccacagggccaaagccatagtgtccggtcccaaggacaaggctcttccagtgctaggagaggtatgagcagcctctcacctgtgagctgtggggatcacaaggctgcctgcctcagtcttggagtcctgttgggtgaatgaggcagatgggaaagagcctcaccagcagctgcttttggagcaggggtccaaggaagagagggtggcctcgacatcaaactgcctggatttttctaccaccctgttacatcataacaacttctgaaacacacaccagccctgagttctgggctcatttgaagcctggaatagcaataaatctttttaacttgcaaaaaaaaaaaaaaagcggcgccgaatagtgagctcg

SEQ ID NO: 103 - DNA, 4814 bp, Homo sapiens
  misc_feature: Template ID: 995174.7
gcagcctgctgccgcggtcagcgcctgctcctgctcctccgctcctcctgcgcggggtgctgaaacagcccggggaagtagagccgcctccggggagcccaaccagccgaacgccgccggcgtcagcagccttgcgcggccacagcatgaccgctcgcggcctggcccttggcctcctcctgctgctactgtgtccagcgcaggtgttttcacagtcctgtgtttggtatggagagtgtggaattgcatatggggacaagaggtacaattgcgaatattctggcccaccaaaaccattgccaaaggatggatatgacttagtgcaggaactctgtccaggattcttctttggcaatgtcagtctctgttgtgatgttcggcagcttcagacactaaaagacaacctgcagctgcctctacagtttctgtccagatgtccatcctgtttttataacctactgaacctgttttgtgagctgacatgtagccctcgacagagtcagtttttgaatgttacagctactgaagattatgttgatcctgttacaaaccagacgaaaacaaatgtgaaagagttacaatactacgtcggacagagttttgccaatgcaatgtacaatgcctgccgggatgtggaggccccctcaagtaatgacaaggccctgggactcctgtgtgggaaggacgctgacgcctgtaatgccaccaactggattgaatacatgttcaataaggacaatggacaggcaccttttaccatcactcctgtgttttcagattttccagtccgtgggatggagcccatgaacaatgccaccaaaggctgtgacgagtctgtggatgaggtcacagcaccatgtagctgccaagactgctctattgtctgtggccccaagccccagcccccacctcctcctgctccctggacgatccttggcttggacgccatgtatgtcatcatgtggatcacctacatggcgtttttgcttgtgttttttggagcattttttgcagtgtggtgctacagaaaacggtattttgtctccggagtacactcccatcgatagcaatatagctttttctgttaatgcaagtgacaaaggagaggcgtcctgctgtgaccctgtcagcgcagcatttgagggctgcttgaggcggctgttcacacgctgggggtctttctgcgtccgaaaccctggctgtgtcattttcttctcgctggtcttcattactgcgtgttcgtcaggcctggtgtttgtccgggtcacaaccaatccagttgacctctggtcagcccccagcagccaggctcgcctggaaaaagagtactttgaccagcactttgggcctttcttccggacggagcagctcatcatccgggcccctctcactgacaaacacatttaccagccatacccttcgggagctgatgtaccctttggacctccgcttgacatacagatactgcaccaggttcttgacttacaaatagccatcgaaaacattactgcctcttatgacaatgagactgtgacacttcaagacatctgcttggcccctctttcaccgtataacacgaactgcaccattttgagtgtgttaaattacttccagaacagccattccgtgctggaccacaagaaaggggacgacttctttgtgtatgccgattaccacacgcactttctgtactgcgtacgggctcctgcctctctgaatgatacaagtttgctccatgacccttgtctgggtacgtttggtggaccagtgttcccgtggcttgtgttgggaggctatgatgatcaaaactacaataacgccactgcccttgtgattaccttccctgtcaataattactataatgatacagagaagctccagagggcccaggcctgggaaaaagagtttattaattttgtgaaaaactacaagaatcccaatctgaccatttccttcactgctgaacgaagtattgaagatgaactaaatcgtgaaagtgacagtgatgtcttcaccgttgtaattagctatgccatcatgtttctatatatttccctagccttggggcacatcaaaagctgtcgcaggcttctggtggattcgaaggtctcactaggcatcgcgggcatcttgatcgtgctgagctcggtggcttgctccttgggtgtcttcagctacattgggttgcccttgaccctcattgtgattgaagtcatcccgttcctggtgctggctgttggagtggacaacatcttcattctggtgcaggcctaccagagagatgaacgtcttcaaggggaaaccctggatcagcagctgggcagggtcctaggagaagtggctcccagtatgttcctgtcatccttttctgagactgtagcatttttcttaggagcattgtccgtgatgccagccgtgcacaccttctctctctttgcgggattggcagtcttcattgactttcttctgcagattacctgtttcgtgagtctcttggggttagacattaaacgtcaagagaaaaatcggctagacatcttttgctgtgtcagaggtgctgaagatggaacaagcgtccaggcctcagagagctgtttgtttcgcttcttcaaaaactcctattctccacttctgctaaaggactggatgagaccaattgtgatagcaatatttgtgggtgttctgtcattcagcatcgcagtcctgaacaaagtagatgttggattggatcagtctctttcgatgccagatgactcctacatggtggattatttcaaatccatcagtcagtacctgcatgcgggtccgcctgtgtactttgtcctggaggaagggcacgactacacttcttccaaggggcagaacatggtgtgcggcggcatgggctgcaacaatgattccctggtgcagcagatatttaacgcggcgcagctggacaactatacccgaataggcttcgccccctgcgtcctggatcgacgattatttcgactgggtgaagccacagtcgtcttgctgtcgagtggacaatatcactgaccagttctgcaatgcttcagtggttgaccctgcctgcgttcgctgcaggcctctgactccggaaggcaaacagaggcctcaggggggagacttcatgagattcctgcccatgttcctttcggataaccctaaccccaagtgtggcaaagggggacatgctgcctatagttctgcagttaacatcctccttggccatggcaccagggtcggagccacgtacttcatgacctaccacaccgtgctgcagacctctgctgactttattgacgctctgaagaaagcccgacttatagccagtaatgtcaccgaaaccatgggcattaacggcagtgcctaccgagtatttccttacagtgtgttttatgtcttctacgaacagtacctgaccatcattgacgacactatcttcaacctcggtgtgtccctgggcgcgatatttctggtgaccatggtcctcctgggctgtgagctctggtctgcagtcatcatgtgtgccaccatcgccatggtcttggtcaacatgtttggagttatgtggctctggggcatcagtctgaacgctgtatccttggtcaacctggtgatgagctgtggcatctccgtggagttctgcagccacataaccagagcgttcacggtgagcatgaaaggcagccgcgtggagcgcgcggaagaggcacttgcccacatgggcagctccgtgttcagtggaatcacacttacaaaatttggagggattgtggtgttggcttttgccaaatctcaaattttccagatattctacttcaggatgtatttggccatggtcttactgggagccactcacggattaatatttctccctgtcttactcagttacatagaaataagaaaaagtctctctctctcatagggccatcagtaaataaagccaaaagttgtgccactgaagagcgatacaaaggaacagagcgcgaacggcttctaaatttctagccctctcgcagggcatcctgactgaactgtgtctaagggtcggtcggtttaccactggacgggtgctgcatcggcaaggccaagttgaacaccggatggtgccaaccatcggttgtttggcagcagctttgaacgtagcgcctgtgaactcaggaatgcacagttgacttgggaagcagtattactagatctggaggcaaccacaggacactaaacttctcccagcctcttcaggaaagaaacctcattctttggcaagcaggaggtgacactagatggctgtgaatgtgatccgctcactgacactctgtaaaggccaatcaatgcactgtctgtctctccttttaggagtaagccatcccacaagttctataccatatttttagtgacagttgaggttgtagatacactttataacattttatagtttaaagagctttattaatgcaataaattaactttgtacacatttttatataaaaaaacagcaagtgatttcagaatgttgtaggcctcattagagcttggtctccaaaaatctgtttgaaaaaagcaacatgttcttcacagtgttcccctagaaaggaagagatttaattgccagttagatgtggcatgaaatgagggacaaagaaagcatctcgtaggtgtgtctactgggttttaacttatttttctttaataaaatacattgttttcctaagttttggggttaccctatctgctttgagagacaaatacaaaagctaaatggaagagattctatctaacctgtccttatggtaactaaatgccgtctt

SEQ ID NO: 104 - DNA, 1497 bp, Homo sapiens
  misc_feature: Template ID: 346599.14
  unsure 1491: a, t, c, g, or other
ggcacaggaaaggacagggtcaggaaaggaggactctgggcggcagcctccacattccccttccacgcttggcccccagaatggaggagggtgtctgtattactgggcgaggtgtcctcccttcctggggactgtggggggtggtcaaaagacctctatgccccacctccttcctccctctgccctgctgtgcctggggcagggggagaacagcccacctcgtgactgggggctggcccagcccgccctatccctgggggagggggcgggacagggggagccctataattggacaagtctgggatccttgagtcctactcagccccagcggaggtgaaggacgtccttccccaggagccgactggccaatcacaggcaggaagatgaaggttctgtgggctgcgttgctggtcacattcctgggcaggatgccaggcccaaggtggagcaagcggtggagacagagccggagcccgagctgcgccagcaggaccgagtggcagagcggccagcgctgggaactggcactgggtcgcttttgggattacctgcgctgggtgcagacactgtctgagcaggtgcaggaggagctgctcagctcccaggtcacccaggaactgagggcgctgatggacgagaccatgaaggagttgaaggcctacaaatcggaactggaggaacaactgaccccggtggcggaggagacgcgggcacggctgtccaaggagctgcaggcggcgcaggcccggctgggcgcggacatggaggacgtgtgcggccgcctggtgcagtaccgcggcgaggtgcaggccatgctcggccagagcaccgaggagctgcgggtgcgcctcgcctcccacctgcgcaagctgcgtaagcggctcctccgcgatgccgatgacctgcagaagcgcctggcagtgtaccaggccggggcccgcgagggcgccgagcgcggcctcagcgccatccgcgagcgcctggggcccctggtggaacagggccgcgtgcgggccgccactgtgggctccctggccggccagccgctacaggagcgggcccaggcctggggcgagcggctgcgcgcgcggatggaggagatgggcagccggacccgcgaccgcctggacgaggtgaaggagcaggtggcggaggtgcgcgccaagctggaggagcaggcccagcagatacgcctgcaggccgaggccttccaggcccgcctcaagagctggttcgagcccctggtggaagacatgcagcgccagtgggccgggctggtggagaaggtgcaggctgccgtgggcaccagcgccgcccctgtgcccagcgacaatcactgaacgccgaagcctgcagccatgcgaccccacgccaccccgtgcctcctgcctccgcgcagcctgcagcgggagaccctgtccccgccccagccgtcctcctggggtggaccctagtttaataaagattcaccaagtttcacgcaaaaaaaanaaaaaa

SEQ ID NO: 105 - DNA, 603 bp, Homo sapiens
  misc_feature: Template ID: 1328674.2
gctaagggaagtgcccgggaccccacctgaccccaacgctcacgggacaggggcagaggagaaaaacgtgggtggacagagggaggcaggcggtcaggggaaggctcaggaggagggagatcaacatcaacctgccccgccccctccccagcctgataaaggtcctgcgggcaggacaggacctcccaaccaagccctccagcaaggattcagagtgcccctccggcctcgccatgaggctcttcctgtcgctcccggtcctggtggtggttctgtcgatcgtcttggaaggcccagccccagcccaggggaccccagacgtctccagtgccttggataagctgaaggagtttggaaacacactggaggacaaggctcgggaactcatcagccgcatcaaacagagtgaactttctgccaagatgcgggagtggttttcagagacatttcagaaagtgaaggagaaactcaagattgactcatgaggacctgaagggtgacatcccaggaggggcctctgaaatttcccacaccccagcgcctgtgctgaggactccctccatgtggccccaggtgccaccaataaaaatcctacagaaaatt

SEQ ID NO: 106 - DNA, 758 bp, Homo sapiens
  misc_feature: Template ID: 1099498.9
cttgagacaggaatcttgcccattccccgaacgaataaaccccttccttcgttaactcagcgtctgaggaattttgtctgcggctcctcctgctacattctgagtggggaaagggactaaggtggtctgaggaccccacagagtcaggaagattgagagcctgataaaggtcctgcgggcaggacaggacctcccaaccaagccctccagcaaggattcagagtgcccctccggcctcgccatgaggctcttcctgtcgctcccggtcctggtggtggttctgtcgatcgtcttggaaggcccagccccagcccaggggaccccagacgtctccagtgccttggataagctgaaggagtttggaaacacactggaggacaaggctcgggaactcatcagccgcatcaaacagagtgaactttctgccaagatgcgggagtggttttcagagacatttcagaaagtgaaggagaaactcaagattgactcatgaggacctgaagggtgacatcccaggaggggcctctgaaatttcccacaccccagcgcctgtgctgaggactccctccatgtggccccaggtgccaccaataaaaatcctacagaaaaaaaaaaaggaaagtaaggggagggggaaggtgagagggctgcaccaaaacccaatggagggaggacgggagaaaaaaaaaaaagggggcgcccccggaattattggccccttggacccggggatttattccggggcgggtacctggggg

SEQ ID NO: 107 - DNA, 4075 bp, Homo sapiens
  misc_feature: Template ID: 049457.6
aagcacaagctgggacgcaatgtgtgtccctctatccctacattgactttgcgggggtggggatggggtgcggggtgagtgagggaggactgcaagtgacaaacaggattcgtcaaaagagaggtgtattaaagtgccgatcaaatgtaatttaacagctaaactttccctccttggaaaacaggtgattgttgagtatttaacgtgaatcgatgtaaacctgtgtttggtgcttagacagggggcccccgggtagagtggaaccccttaagctaagcgaacaggagcctaacaaagcaaatttttccgtctgccctttccccctcttctcgttggcagggttgatcctcattactgtttgctcaaacgtttagaagtgaatttaggtccctccccccaacttatgattttatagccaataggtgatgaggtttatttgcatatttccagtcacataagcagccttggcgtgaaaacagtgtcagactcgattccccctcttcctcctcctcaagggaaagctgcccacttctagctgccctgccatcccctttaaagggcgacttgctcagcgccaaaccgcggctccagccctctccagcctccggctcagccggctcatcagtcggtccgcgccttgcagctcctccagagggacgcgccccgagatggagagcaaagccctgctcgtgctgactctggccgtgtggctccagagtctgaccgcctcccgcggaggggtggccgccgccgaccaaagaagagattttatcgacatcgaaagtaaatttgccctaaggacccctgaagacacagctgaggacacttgccacctcattcccggagtagcagagtccgtggctacctgtcatttcaatcacagcagcaaaaccttcatggtgatccatggctggacggtaacaggaatgtatgagagttgggtgccaaaacttgtggccgccctgtacaagagagaaccagactccaatgtcattgtggtggactggctgtcacgggctcaggagcattacccagtgtccgcgggctacaccaaactggtgggacaggatgtggcccggtttatcaactggatggaggaggagtttaactaccctctggacaatgtccatctcttgggatacagccttggagcccatgctgctggcattgcaggaagtctgaccaataagaaagtcaacagaattactggcctcgatccagctggacctaactttgagtatgcagaagccccgagtcgtctttctcctgatgatgcagattttgtagacgtcttacacacattcaccagagggtcccctggtcgaagcattggaatccagaaaccagttgggcatgttgacatttacccgaatggaggtacttttcagccaggatgtaacattggagaagctatccgcgtgattgcagagagaggacttggagatgtggaccagctagtgaagtgctcccacgagcgctccattcatctcttcatcgactctctgttgaatgaagaaaatccaagtaaggcctacaggtgcagttccaaggaagcctttgagaaagggctctgcttgagttgtagaaagaaccgctgcaacaatctgggctatgagatcaataaagtcagagccaaaagaagcagcaaaatgtacctgaagactcgttctcagatgccctacaaagtcttccattaccaagtaaagattcatttttctgggactgagagtgaaacccataccaatcaggcctttgagatttctctgtatggcaccgtggccgagagtgagaacatcccattcactctgcctgaagtttccacaaataagacctactccttcctaatttacacagaggtagatattggagaactactcatgttgaagctcaaatggaagagtgattcatactttagctggtcagactggtggagcagtcccggcttcgccattgcagaagatcagagtaaaagcaggagagactcagaaaaaggtgatcttctgttctagggagaaagtgtctcatttgcagaaaggaaaggcacctgcggtatttgtgaaatgccatgacaagtctctgaataagaagtcaggctgaaactgggcgaatctacagaacaaagaacggcatgtgaattctgtgaagaatgaagtggaggaagtaacttttacaaaacatacccagtgtttggggtgtttcaaaagtggattttcctgaatattaatcccagccctacccttgttagttattttaggagacagtctcaagcactaaaaagtggctaattcaatttatggggtatagtggccaaatagcacatcctccaacgttaaaagacagtggatcatgaaaagtgctgttttgtcctttgagaaagaaataattgtttgagcgcagagtaaaataaggctccttcatgtggcgtattgggccatagcctataattggttagaacctcctattttaattggaattctggatctttcggactgaggccttctcaaactttactctaagtctccaagaatacagaaaatgcttttccgcggcacgaatcagactcatctacacagcagtatgaatgatgttttagaatgattccctcttgctattggaatgtggtccagacgtcaaccaggaacatgtaacttggagagggacgaagaaagggtctgataaacacagaggttttaaacagtccctaccattggcctgcatcatgacaaagttacaaattcaaggagatataaaatctagatcaattaattcttaataggctttatcgtttattgcttaatccctctctcccccttcttttttgtctcaagattatattataataatgttctctgggtaggtgttgaaaatgagcctgtaatcctcagctgacacataatttgaatggtgcagaaaaaaaaaaaagaaaccgtaattttattattagattctctaaatgattttcatcaatttaaaatcattcaatatctgacagttactcttcagttttaggcttaccttggtcatgcttcagttgtacttccagtgcgtctcttttgttcctggctttgacatgaaaagataggtttgagttcaaattttgcattgtgtgagcttctacagattttagacaaggaccgtttttactaagtaaaagggtggagaggttcctggggtggattcctaagcagtgcttgtaaaccatcgcgtgcaatgagccagatggagtaccatgagggttgctatttgttgtttttaacaactaatcaagagtgagtgaacaactatttataaactagatctcctatttttcagaatgctcttctacgtataaatatgaaatgataaagatgtcaaatatctcagaggctatagctgggaacccgactgtgaaagtatgtgatatctgaacacatactagaaagctctgcatgtgtgttgtccttcagcataattcggaagggaaaacagtcgatcaagggatgtattggaacatgtcggagtagaaattgttcctgatgtgccagaacttcgaccctttctctgagagagatgatcgtgcctataaatagtaggaccaatgttgtgattaacatcatcaggcttggaatgaattctctctaaaaataaaatgatgtatgatttgttgttggcatcccctttattaattcattaaatttctggatttgggttgtgacccagggtgcattaacttaaaagattcactaaagcagcacatagcactgggaactctggctccgaaaaactttgttatatatatcaaggatgttctggctttacattttatttattagctgtaaatacatgtgtggatgtgtaaatggagcttgtacatattggaaaggtcattgtggctatctgcatttataaatgtgtggtgctaactgtatgtgtctttatcagtgatggtctcacagagccaactcactcttatgaaatgggctttaacaaaacaagaaagaaacgtacttaactgtgtgaagaaatggaatcagcttttaataaaattgacaacattttattaccacaaaaaaaaaagggagaatccacatacaac

SEQ ID NO: 108 - DNA, 1875 bp, Homo sapiens
  misc_feature: Template ID: 092511.1
tttcctcaggtgctacaaagcagccagggtgtgcgtgcgctcccgcctcgtcgcttggcaacctgagaagctgtccggtcgtcccaacttatcaattcccccgcccctccagagtgtcaatcgttttttaaaagattttgtttccgggtcgatccagctttacgcagcggaaggtctctttacctcccacgtttaccctcatgggaggatgcagtctcagtcacgcgcgtgggggtgatgtcgctaaggggtgattctcccctccctagagttacacacgctatctctcccgccaattgccgggctccatcaggcaggtcctttcctcctgagcccaaaccatccgtttgttgtcgtcctccaatcacaggggctcatcctcagggactactttgcaatcggcgcagagcgcagtgagaagagcttgaaaaaaacctctggtatcgggaagtgtagttcaacacttgaaggaaatgctttggagattgcgccacaaccagggcagcgtaaactacagttcccagagagcgccgcgtcgggagcggagccttttctcgctaacaccgctcgccctctccgagtcagttccgcggtagaggtgacctgactctctgaggctcattttgcagttgttgaaattgtccccgcagttttcaatcatgtctgaaccaatcagagtccttgtgactggagcagctggtcaaattgcatattcactgctgtacagtattggaaatggatctgtctttggtaaagatcagcctataattcttgtgctgttggatatcacccccatgatgggtgtcctggacggtgtcctaatggaactgcaagactgtgcccttcccctcctgaaagatgtcatcgcaacagataaagaagacgttgccttcaaagacctggatgtggccattcttgtgggctccatgccaagaagggaaggcatggagagaaaagatttactgaaagcaaatgtgaaaatcttcaaatcccagggtgcagccttagataaatacgccaagaagtcagttaaggttattgttgtgggtaatccagccaataccaactgcctgactgcttccaagtcagctccatccatccccaaggagaacttcagttgcttgactcgtttggatcacaaccgagctaaagctcaaattgctcttaaacttggtgtgactgctaatgatgtaaagaatgtcattatctggggaaaccattcctcgactcagtatccagatgtcaaccatgccaaggtgaaattgcaaggaaaggaagttggtgtttatgaagctctgaaagatgacagctggctcaagggagaatttgtcacgactgtgcagcagcgtggcgctgctgtcatcaaggctcgaaaactatccagtgccatgtctgctgcaaaagccatctgtgaccacgtcagggacatctggtttggaaccccagagggagagtttgtgtccatgggtgttatctctgatggcaactcctatggtgttcctgatgatctgctctactcattccctgttgtaatcaagaataagacctggaagtttgttgaaggtctccctattaatgatttctcacgtgagaagatggatcttactgcaaaggaactgacagaagaaaaagaaagtgcttttgaatttctttcctctgcctgactagacaatgatgttactaaatgcttcaaagctgaagaatctaaatgtcgtctttgactcaagtaccaaataataataatgctatacttaaattacttgtgaaaaacaacacattttaaagattacgtgcttcttggtacaggtttgtgaatgacagtttatcgtcatgctgttagtgtgcattctaaataaatatatattcaaatgaaaa

SEQ ID NO: 109 - DNA, 786 bp, Homo sapiens
  misc_feature: Template ID: 092511.6
ttcaattccacctttcgggcgcggtaagaggtgacctgactctctgaggctcattttgcagttgttgaaattgtccccgcagttttcaatcatggttattgttgtgggtaatccagccaataccaactgcctgactgcttccaagtcagctccatccatccccaaggagaacttcagttgcttgactcgtttggatcacaaccgagctaaagctcaaattgctcttaaacttggtgtgactgctaatgatgtaaagaatgtcattatctggggaaaccattcctcgactcagtatccagatgtcaaccatgccaaggtgaaattgcaaggaaaggaagttggtgtttatgaagctctgaaagatgacagctggctcaagggagaatttgtcacgactgttcagcagcgtggcgctgctgttcatcaaggctcgaaaactatccagtgccatgtctgctgcaaaagccatctgtgaccacgtcagggacatctggtttggaacccccagaggggagagtttgtgtccatgggtgttatctctgatggcaactcctatggtgttcctgatgatctgctctactcattccctgttgtaatcaagaataagacctggaagtttgttgaaggtctccctattaatgatttctcacgtgagaagatggatcttactgcaaaggaactgacagaagaaaaagaaagtgctttgaatttctttcctctgcctgactagacaatgatgttactaaatgcttcaaagctgaagaatctaaatgtcgtctttgactc

SEQ ID NO: 110 - DNA, 4031 bp, Homo sapiens
  misc_feature: Template ID: 238609.2
ccgcagctccgggcggcgtcggcagcggcgcgagaggcgacgaggcccgggcggcaggagccggcgcggcgaccgcggcgagggcggcggggacggagcagagcacgacgaagacgcacaggcagccgggccgggccgggccacggggagagcggccggcgggcagcgggcgggaggccgggcgggccgcgggcagccaccgagccgcgaagcggacatggtgctgctcaaggagtatcgagtaatcctgcctgtgtctgtagatgagtatcaagtggggcagctgtattctgtggctgaggccagtaaaaatgaaacgggtggtggcgaaggcgtggaggtcctggtgaatgagccctacgagaaggacggtgagaaaggccagtacacacacaagatctaccacctgcagagcaaagtacccacgtttgttcgaatgctggccccagagggagccctgaatatacacgagaaagcctggaatgcttacccctactgcagaaccgttattacaaatgagtacatgaaagaagactttctgattaaaattgaaacctggcacaaaccagatcttggcacgcaggagaatgtgcataagctggagcctgaggcgtggaaacacgtggaagccgtatatatagacattgcagatcgaagccaagtgctcagcaaggattacaaggcagaggaagacccagcaaaatttaaatctatcaaaacaggccgaggacccttgggccccaattggaagcaagagcttgtaaaccagaaggactgcccatatatgtgtgcatacaaactggtgaccgtcaagttcaagtggtggggcctgcagaacaaagtggagaacttcatccataagcaagagaggcgtctgtttacaaacttccacaggcagctgttctgttggctcgataagtgggttgacctgaccatggacgacattcgaaggatggaagaagagacgaagagacagctggatgaaatgagacaaaaggacccagtgaaaggaatgacagcagatgactaaagccgcctttcccctctgcactttttgcaagacagtggtcaacaggaagacccagcagctccaccctcccaagtgacaggccattttcggacgcagccgttctgtgcccattcttcaggcaactttcgattccttactgtagctaattctagatgcccttcagtattgtgaacaaatagaccgtctggtgtcacagagcccgcgtgtgcaggagcctgctcctccgagatacgtggcgtgtaggttgctgtagttacagcgcctccgtctctctccattgtgttccgatccatttctgtgtgttcccccaacctttatttccaagtgacattttcagtctttcaaatagctgccttttgtgatgtggtgatttaaatgatttaagttcatttgttctcaaccttggggtaaactgaggtattttgcttcctgggaagatcttcgcaattttgagtgctcctgtggggagcggggatgagctaaagatacaatgtttccctgccccgcaccgcttccacaaaatagcaatgtggttttgcagctctgacttctgctcccagtaacccatcgttagggcactctagcactatggaggtacccaaggctcagccagtctctatttaagaaaatttaacaaatacgagtaaccctgtcccaatcactgaatctctagttactactcttagaaacacctgtggcttcttggccctcctgttgcccgctctgaatctctctgcagtctacaaaatcgccccagtcaactctccacttggagggaattgtccagtgtggcccctagaattgagtcaccccctagataccaactgtctgaccccgaggagctctgtaagtccctgctcctcctcttccctttggggctggtgctgccactcagcaataatcctcttttctctgtgctttcttaggtccctgtcctctgtctttgaggctggttaggaagcaagagtcctgatctttcatgctgcacaatatgagcatgcaaaaagctttttccagcagaacatgttccctcgtctccagttgccggaaaggaatttggggatcaagaacttagctcgtcctacccccatgttgagttctgccctggaaaacccaaagcaagtagtgatcatagtacagaacccgaccaaagtaggctggtgaggaagtccaggctccaggggaacagacgctgcccagtgttcatagcttcctgcaacttgacagagcctgagtttgcctcttagtgggagaatgagagagagctgtagtgtcacctgacattccccaaaccttgtgaagcacgttggcctaagtgtgccgtgatcccagcccacactagcctgggtgcatctgctaatgggagaccaaatctttgtccgggaagcaagaagtgggtgggagaatgtatcctgtttttgtcagtttgtttgccttactcatttctaagtgcaataagggagtgtctcacaggattgcacctgtgacatcctgatggatgcttccctgtggccctcctggggcaagggtggacagactcagacccccagcatggttagcgctgaccttcattgaggtccctttggaaccagatgtcttgttacagacaccttcctctgtgtaagtctcctcaccttgaggggtctttagtaatgcatctgggtagcatctcaactgctggtagcatttatctgacttggaaagttggagaagaggcattcctactggagaaaaatgtcagtgttttcctataagctctgtgttagctattcattatatttgtgcttaaagatgttccttcattcatcaactaggggaagtccagatgcgggttatcttgaaagaaacaaactgacattctaggcagacagttgtctatgtggtctgagggtcagcagctgttagtctccttcctttggctcttgagacccacacatatcactttagccctaacaagggctcctcccacctccacctgttgccccagttgaaaagcatccattatgagctgaggtcagcctggatctggaattgcagcccacataaacataaaggaggatgtccctggtctgttccatccccacggatggtgttgctgctgggcaacagtgttggcttcttttaagtaccccctttcctcctcacccacctccaaactgactagcactcagagggacttatgataaaggttcagctccaggggtagtacctgagtgtgtgccatgccccttcagaccagctgcttccatcagaattccagggtcacagccccaacagaagcagcagtgcctctgtaggaggggtgctgggctctggccttctcatgcagagaggtccgggacagggtcagtatcgtgggcatgtgtatagcttcccaagttcttttacagtccctgctgggactccctgacttactttggttggttcctagtgctacttgttttacaaactacactttgtagaattgattagattaccttgtttatttaatgtgagtttgtgcctttttgtctcaatcttccaatacaggtatattgagaaaaaaagcagtctaataaaatcctagacagaactttctggagtccagtttggtgatgtccattttccagctgtatgtatcctcaaacttgcactgataaccgccattttaccagggcaggattaggaagaggtacaaaggtgtgtctgaaaatttttgcacgtggatttctgcatataatagtcccgtgtcagtttacttatgcaaacattgcacatctgaattgtaattcggccgtttcctactgacaggatgtccttttgcttttgtctgcctcctcttcacatcttcctctttatccaccctgcagccggggggcgggggagaccggatcccaggcaggacagtggctaggctgcgtgtccccacccccgaccctcgtttgacccctgggagccggggcgaagacagcacaaggacggagccctcggatccctcacgagtggggcagaggctgcggcg

SEQ ID NO: 111 - DNA, 703 bp, Homo sapiens
  misc_feature: Template ID: 252895.15
gcgcgtgcacagccaggctgcgaaggtgcagcgggcgggaggcccgttgggggctcagccggctgccagaagctctcgggctctttccttccgtgcccctcacttgctcatgggcccatgcctagccctgattcgttggacagagcctttgtagacccttgtctgagaccgagctatgtggggcgacctctggctcctcccgcctgcctctgccaatccgggcactgggacagaggctgagtttgagaaagctgcagaggaggttaggcaccttaagaccaagccatcggatgaggagatgctgttcatctatggccactacaaacaagcaactgtgggcgacataaatacagaacggcccgggatgttggacttcacgggcaaggccaagtgggatgcctggaatgagctgaaagggacttccaaggaagatgccatgaaagcttacatcaacaaagtagaagagctaaagaaaaaatacgggatatgagagactggatttggttactgtgccatgtgtttatcctaaactgagacaatgccttgtttttttctaataccgtggatggtgggaattcgggaaaataaccagttaaaccagctactcaaggctgctcaccatacggctctaacagattaggggctaaaacgattactgactttccttgagtagtttttatctgaaatcaattaaaagtgtatt

SEQ ID NO: 112 - DNA, 844 bp, Homo sapiens
  misc_feature: Template ID: 252895.16
  unsure 162-184: a, t, c, g, or other
attaaaagttgcaggagaatagatgtcacagaaatagagttctcagtgtttaacatataaaaggtgatctttttctctttgttttgtggatgagtaaattaacattccctcccatttcttcctctctctcttaatggctcagactgaattcaatttctttcnnnnnnnnnnnnnnnnnnnnnnngcaaaatgaaatgcttacagggagttataatgcaataacatagccattacccagctttgtaaaatgttaacatttcgatgtaataagaatactgttcttcctatttgctctagattttaagtttggattggcatacattggttttcttagggcagaacccactctactagacctatttaaccccatgacagagcctagaaggaacaggtgtaatagaagatggcatttatggcaagaaggttgatcaagttctccattagaatttgaaccagatctaatgccttttcttcccttgtttaagaacggcccgggatgttggacttcacgggcaaggccaagtgggatgcctggaatgagctgaaagggacttccaaggaagatgccatgaaagcttacatcaacaaagtagaagagctaaagaaaaaatacgggatatgagagactggatttggttactgtgccatgtgtttatcctaaactgagacaatgccttgtttttttctaataccgtggatggtgggaattcgggaaaataaccagttaaaccagctactcaaggctgctcaccatacggctctaacagattaggggctaaaacgattactgactttccttgagtagtttttatctgaaatcaattaaaagtgtatttgttacttt

SEQ ID NO: 113 - DNA, 1071 bp, Homo sapiens
  misc_feature: Template ID: 995880.12
aaagcagccgccggcgccgggtgcctcacagcacgctgccacgccgacgcagacccctctctgcacgccagcccgcccgcacccaccatggccacagttcagcagctggaaggaagatggcgcctggtggacagcaaaggctttgatgaatacatgaaggagctaggagtgggaatagctttgcgaaaaatgggcgcaatggccaagccagattgtatcatcacttgtgatggtaaaaacctcaccataaaaactgagagcactttgaaaacaacacagttttcttgtaccctgggagagaagtttgaagaaaccacagctgatggcagaaaaactcagactgtctgcaactttacagatggtgcattggttcagcatcaggagtgggatgggaaggaaagcacaataacaagaaaattgaaagatgggaaattagtggtggagtgtgtcatgaacaatgtcacctgtactcggatctatgaaaaagtagaataaaaattccatcatcactttggacaggagttaattaagagaatgaccaagctcagttcaatgagcaaatctccatactgtttctttcttttttttttcattactgtgttcaattatctttatcataaacattttacatgcagctatttcaaagtgtgttggattaattaggatcatccctttggttaataaataaatgtgtttgtgctaatatatcttgtatgcattctttaaaccttacaggaaattagtgatgagttttaataattattaattgagtaaaggttggggcagtcttgagggtacgtatattgagatgacactctagcaatttatatagatagctactcttacaggaaatactgtaccaattatttaagcttgccctatactatttgaactttgtatgaattcaggaatcttgaatttctggcagagaccattctcaataaaaggtgactacaacataaactttattattcaaattagagcaaaggtttaattaaccagcattgactaaaatactttttgtgtgtatttatatacaaatataagtaatactatgtatggaataaccag

SEQ ID NO: 114 - DNA, 411 bp, Homo sapiens
  misc_feature: Template ID: 001726.1
  unsure 21: a, t, c, g, or other
atagtttttatattgaaaggnaggattttttttcccatttgttagcatcatgattgtgctgctgagttttaaaagattgtgctatttgaatatctcaggatcaatttctattttgtgtagtctattaatcaaatatttatcgagaacatttatatgccagactgtgctggagtcatagaatgtaatggttggcagaatctagtaaaaagaaaaagattgagcaaactcctgaatttgcaattttgaatgctttatctccaccttctatcaactgctttgagtaaataaaatttggaagtccacatttcttccctaactttctgaaagccagcatagcatggtggcccagagctcagatttggagccagggtgccagtggctcttggttccccagctcccatcactttctag

SEQ ID NO: 115 - DNA, 1980 bp, Homo sapiens
  misc_feature: Template ID: 179368.2
gtgagagtgaagggagagcgcgagctctgaagcccgctagactaagcttgcaatctgagctccattcaccccctcctatttcttgagaccttgtcagttcccctgtgagcctcggactcacttgtaaaacgaggacagatgcccgtgccagaagtcaaccagagctttccccggcgtgggcaccagcccaagggcgttttgcttttctagtctcatctctgctctgacgctaagctcaaagagggactgggggacgggaagatatccaccatggcatgcgccctagctctcgggctggtgtcggctgcttccttctcagattccagagtgcctagaggccaggaaagggagaaggtcctaccagcctggggtagggactcgggggccaggcactggcgctgacgcaggctagcagggcgccactggctggtccccatccacctcggtgggttgggggatgggcgcaccagcccctcctgggtgagccctagcctggggcttcctatttcgggagccgggggcgtgggccacgtctcctcatgtgatgcgagggctatttaaagcggcacccgggcagggagccgccgtcggagcccttggcacgcctgctctcttgtagcttctctcagcctagcccagcatcactatggtggacgctttcctgggcacctggaagctagtggacagcaagaatttcgatgactacatgaagtcactcggtgtgggttttgctaccaggcaggtggccagcatgaccaagcctaccacaatcatcgaaaagaatggggacattctcaccctaaaaacacacagcaccttcaagaacacagagatcagctttaagttgggggtggagttcgatgagacaacagcagatgacaggaaggtcaagtccattgtgacactggatggagggaaacttgttcacctgcagaaatgggacgggcaagagaccacacttgtgcgggagctaattgatggaaaactcatcctgacactcacccacggcactgcagtttgcactcgcacttatgagaaagaggcatgacctgactgcactgttgctgactactactctgccaatcggctacccctcgactcagcaccacattgcctcatttcttcctctgcattttgtacaaatccacgaattcttctggggtcaggtgccactgaccgggatccagttccagttcccatggtgtatgtggtttttttttttttttttttaactgcactcatagggtgctctgaggtcaataaagcagagccaaggccacccagttgcctttttgcctttggtaacataactctgggagtcttggtttatcctgtgtgtcagagagtgggcagaaataacggcctgaaggttactgaggaagaagcactggatgggagactgaaatggacagtctcggagcctgttaatcagctgatcaccttacacatttaataataaaagagctgtacctacacgttgcctttacactgccccccctccatggtcaaatgacctagttcagtcagtgatggggcttccccaggtttggctattgaactgtcacttcaggcccatcctacactgaaagctcttgggtctggctgttctctgtgaaatgctgtagtctctccctttccagaattcaggttcagggcacagaacccaggcttgtaccatggtggtgggagaaaatgaccactggccaagaggactgctgacctgtgcaccaggctagtacttatgactacaaattcttactgcttctctaatcaactctgagggaagagggcatctgatcattacaaaagggagggcttataagtgatctcccaagaaggcagtgatctgctagtgcctttggctctgtacctctgctgggcatctctccaaggtctaaggtaacatattaaatgtttttgtcagctaatgcaggctcagtgactttaagtctgtaagttacccaggaagaaggattatag

SEQ ID NO: 116 - DNA, 2853 bp, Homo sapiens
  misc_feature: Template ID: 410917.7
  unsure 207-395: a, t, c, g, or other
gccgcggccagacgtttgcggagtccagggtctttcggagttgaatttgcagctgggctccttcactttggtctcggcttttatctgcctccctgataggtttttggtcttggtgacttcaagaatgaagctgcggactctcgctgtgagtgctacagttgttaaagatggcgtgtctggagtttgttcctttcgatgttcagatgnnnnnnnnnnnnnnnnnnnnnnnnnnnnnnnnnnnnnnnnnnnnnnnnnnnnnnnnnnnnnnnnnnnnnnnnnnnnnnnnnnnnnnnnnnnnnnnnnnnnnnnnnnnnnnnnnnnnnnnnnnnnnnnnnnnnnnnnnnnnnnnnnnnnnnnnnnnnnnnnnnnnnnnnnnnnnnnnnnnnnnnnnnnnnaatgaaaatgcggttcttggggttggtggtctgtttggttctctggaccctgcattctgaggggtctggagggaaactgacagctgtggatcctgaaacaaacatgaatgtgagtgaaattatctcttactggggattccctagtgaggaatacctagttgagacagaagatggatatattctgtgccttaaccgaattcctcatgggaggaagaaccattctgacaaaggtcccaaaccagttgtcttcctgcaacatggcttgctggcagattctagtaactgggtcacaaaccttgccaacagcagcctgggcttcattcttgctgatgctggttttgacgtgtggatgggcaacagcagaggaaatacctggtctcggaaacataagacactctcagtttctcaggatgaattctgggctttcagttatgatgagatggcaaaatatgacctaccagcttccattaacttcattctgaataaaactggccaagaacaagtgtattatgtgggtcattctcaaggcaccactataggttttatagcattttcacagatccctgagctggctaaaaggattaaaatgttttttgccctgggtcctgtggcttccgtcgccttctgtactagccctatggccaaattaggacgattaccagatcatctcattaaggacttatttggagacaaagaatttcttccccagagtgcgtttttgaagtggctgggtacccacgtttgcactcatgtcatactgaaggagctctgtggaaatctctgttttcttctgtgtggatttaatgagagaaatttaaatatgtctagagtggatgtatatacaacacattctcctgctggaacttctgtgcaaaacatgttacactggagccaggctgttaaattccaaaagtttcaagcctttgactggggaagcagtgccaagaattattttcattacaaccagagttatcctcccacatacaatgtgaaggacatgcttgtgccgactgcagtctggagcgggggtcacgactggcttgcagatgtctacgacgtcaatatcttactgactcagatcaccaacttggtgttccatgagagcattccggaatgggagcatcttgacttcatttggggcctggatgccccttggaggctttataataaaattattaatctaatgaggaaatatcagtgaaagctggacttgagctgtgtaccaccaagtcaatgattatgtcatgtgaaaatgtgtttgcttcatttctgtaaaacacttgtttttctttcccaggtcttttgtttttttatatccaagaaaatgataactttgaagatgcccagttcactctagtttcaattagaaacatactagctattttttctttaattagggctggaataggaagccagtgtctcaaccatagtattgtctctttaagtcttttaaatatcactgatgtgtaaaaaggtcattatatccattctgtttttaaaatttaaaatatattgactttttgcccttcataggacaaagtaatatatgtgttggaattttaaaattgtgttgtcattggtaaatctgtcactgacttaagcgaggtataaaagtacgcagttttcatgtccttgccttaaagagctctctagtctaacggtcttgtagttagagatctaaatgacattttatcatgttttcctgcagcaggtgcatagtcaaatccagaaatatcacagctgtgccagtaataaggatgctaacaattaattttatcaaacctaactgtgacagctgtgatttgacacgttttaattgctcaggttaaatgaaatagttttccggcgtcttcaaaaacaaattgcactgataaaacaaaaacaaaagtatgttttaaatgctttgaagactgatacactcaaccatctatattcatgagctctcaatttcatggcaggccatagttctacttatctgagaagcaaatccctgtggagactataccactattttttctgagattaatgtactcttggagcccgctactgtcgttattgatcacatctgtgtgaagccaaagccccgtggttgcccatgagaagtgtccttgttcattttcacccaaatgaagtgtgaacgtgatgttttcggatgcaaactcagctcagggattcattttgtgtcttagttttatatgcatccttatttttaatacacctgcttcacgtccctatgttgggaagtccatatttgtctgcttttcttgcagcatcatttccttacaatactgtccggtggacaaaatgacaattgatatgtttttctgatataattactttagctgcactaacagtacaatgcttgttaatggttaatataggcagggcgaatactactttgtaacttttaaagtcttaaacttttcaataaaattgagtgagacttataggcccaaag

SEQ ID NO: 117 - DNA, 2736 bp, Homo sapiens
  misc_feature: Template ID: 336012.15
  unsure 237, 408: a, t, c, g, or other
atttcacatcacaacgacttgtggttttaatcctccgtttttctgcttctgaagttacttcagcctggcaagtcctttacctccccgtaggcctggcgagctgcatcacaacattcaagattcaccctagagccatctgggaaactttcttctccaggtcgccctgcgtcctcgcctccccaccccgttcttctcgagtcgggtgagctgtctagttccatcacggccggcacggcntaggggtggccggttatttactgctctactgggcccgtgagcagtctggcgagccgagcagttgccgacgcccggcacaatccgctgcacgtagcaggtgcctcaggtccaggccggaagtgaaagggcagggtgtgggtcctcctggggtcgcaggcgcagagccgcctnctggtcacgtgattcgccgataagtcacgggggcgccgctcacctgaccagggtctcacgtggccagccccctccgagaggggagaccagcgggccatgcacaagctccaggctttggttttcgctgctgctggcggcagcgtttcgcaggacgggcgacggccctctggccctggcctcagaacttccaaacctccgaccagcgctacgtcctttacccgaacaactttcaattccagtacgatgtcagctcggccgcgcagcccggctgctcagtcctcgacgaggccttccagcgctatcgtgacctgcttttcggttccgggtcttggccccgtccttacctcacagggaaacggcatacactggagaagaatgtgttggttgtctctgtagtcacacctggatgtaaccagcttcctactttggaagtcagtggagaattataccctgaccataaatgatgaccagtgtttactcctctctgagactgtctggggagctctccgaggtctggagacttttagccagcttgtttggaaatctgctgagggcacattctttatcaacaagactgagattgaggactttccccgctttcctcaccggggcttgctgttggatacatctcgccattacctgccactctctagcatcctggacactctggatgtcatggcgtacaataaattgaacgtgttccactggcatctggtagatgatccttccttcccatatgagagcttcacttttccagagctcatgagaaaggggtcctacaaccctgtcacccacatctacacagcacaggatgtgaaggaggtcattgaatacgcacggctccggggtatccgtgtgcttgcagagtttgacactcctggccacactttgtcctggggaccaggtatccctggattactgactccttgctactctgggtctgagccctctggcacctttggaccagtgaatcccagtctcaataatacctatgagttcatgagcacattcttcttagaagtcagctctgtcttcccagatttttatcttcatcttggaggagatgaggttgatttcacctgctggaagtccaacccagagatccaggactttatgaggaagaaaggcttcggtgaggacttcaagcagctggagtccttctacatccagacgctgctggacatcgtctcttcttatggcaagggctatgtggtgtggcaggaggtgtttgataataaagtaaagattcagccagacacaatcatacaggtgtggcgagaggatattccagtgaactatatgaaggagctggaactggtcaccaaggccggcttccgggcccttctctctgccccctggtacctgaaccgtatatcctatggccctgactggaaggatttctacgtagtggaacccctggcatttgaaggtacccctgagcagaaggctctggtgattggtggagaggcttgtatgtggggagaatatgtggacaacacaaacctggtccccaggctctggcccagagcaggggctgttgccgaaaggctgtggagcaacaagttgacatctgacctgacatttgcctatgaacgtttgtcacacttccgctgtgagttgctgaggcgaggtgtccaggcccaacccctcaatgtaggcttctgtgagcaggagtttgaacagacctgagccccaggcaccgaggagggtgctggctgtaggtgaatggtagtggagccaggcttccactgcatcctggccaggggacggagccccttgccttcgtgccccttgcctgcgtgcccctgtgcttggagagaaaggggccggtgctggcgctcgcattcaataaagagtaatgtggcatttttctataataaacatggattacctgtgtttaaaaaaaaaagtgtgaatggcgttagggtaagggcacagccaggctggagtcagtgtctgcccctgaggtcttttaagttgagggctgggaatgaaacctatagcctttgtgctgttctgccttgcctgtgagctatgtcactcccctcccactcctgaccatattccagacacctgccctaatcctcagcctgctcacttcacttctgcattatatctccaaggcgttggtatatggaaaaagatgtaggggcttggaggtgttctggacagtggggagggctccagacccaacctggtcacaaaagagcctctcccccatgcatactcatccacctccctcccctagagctattctcctttgggtttcttgctgctgcaattttatacaaccattatttaaatattattaaacacatattgttctcc

SEQ ID NO: 118 - DNA, 2356 bp, Homo sapiens
  misc_feature: Template ID: 235128.9
gcggcgccacgcccaggccggccgaggcggttcccggagtctcgcgcccgccgtcatgtgacacagcgaagatggcgtcgcccggctgcctgtggctcttgggctgtggctctcctgccatggacctgcgcttctcgggcgctgcagcatctggacccgccggcgccgctgccgttggtgatctggcatgggatgggagacagctgttgcaatcccttaagcatgggtgctattaaaaaaatggtggagaagaaaatacctggaatttacgtcttatctttagagattgggaagaccctgatggaggacgtggagaacagcttcttcttgaatgtcaattcccaagtaacaacagtgtgtcaggcacttgctaaggatcctaaattgcagcaaggctacaatgctatgggattctcccagggaggccaatttctgagggcagtggctcagagatgcccttcacctcccatgatcaatctgatctcggttgggggacaacatcaaggtgtttttggactccctcgatgcccaggagagagctctcacatctgtgacttcatccgaaaaacactgaatgctggggcgtactccaaagttgttcaggaacgcctcgtgcaagccgaatactggcatgaccccataaaggaggatgtgtatcgcaaccacagcatcttcttggcagatataaatcaggagcggggtatcaatgagtcctacaagaaaaacctgatggccctgaagaagtttgtgatggtgaaattcctcaatgattccattgtggaccctgtagattcggagtggtttggattttacagaagtggccaagccaaggaaaccattcccttacaggagacctccctgtacacacaggaccgcctggggctaaaggaaatggacaatgcaggacagctagtgtttctggctacagaaggggaccatcttcagttgtctgaagaatggttttatgcccacatcataccattccttggatgaaacccgtatagttcacaatagagctcagggagcccctaactcttccaaaccacatgggagacagtttccttcatgcccaagcctgagctcagatccagcttgcaactaatccttctatcatctaacatgccctacttggaaagatctaagatctgaatcttatcctttgccatcttctgttaccatatggtgttgaatgcaagtttaattaccatggagattgttttacaaacttttggatgtggtcaagttcagttttagaaaagggagtctgttccagatcagggccagaactgtgcccaggccccaaaggagacaactaactaaagtagtgagatagattctaagggcaaacatttttccaagtcttgccatatttcaagcaaagaggtgcccaggcctgaggtactcacataaatgctttgttttgctggtgatttaaccagtgcttggaaaaatcttgcttggctatttctgcatcatttcttaaggctgccttcctctctgagtacgttgccctctgtgctatcaatcatcttatcatcaattattagacaaatcccactggcctacagtcttgcttctgcagcacccactttgtctcctcaggtagtgatgaattagttgctgtcacaaaaggagggaagtagcacccaaattaaattgcttaagagaggaaatgtacatcttgtataacttagggagcgaagaaaatgtaggcgcgaaagtgaaaagtgaggcagctagttcttcctattccattctcgaccaacctgccctttcttaatatgactagtggtcttgatgctagagtcaacttactctgttgctggctttagcagagaataggaggaaccatatgaaaaagatcaggctttctgacttccatccccaaaacacatttaccagcatactccaaactgtttctgatgtgttccatgagaaaaggattgtttgctcaaaaagcttggaaaatactacacactccctttctccttctggagatcaacccacattagagtgtctaaggactcctgagaattcctgttacagtaaacaaaactaacgtaatctaccatttcctacactatttgagcatggaaatcatagtccccactctgtgaaaacttaacgctttttggaagacatttctgtagcatgtcagtttggagaaatgatgagctacgccttgatgaaagaaccgtgttggtgctgctaagtttagccattatggtttttcctttctctctcttaagccttattcttcaactaaaagatgaggattaagagcaagaagttgggggggatgtgaaaataattttatgaggttgtctaaaataaagagtagtttcttatccttaaa

SEQ ID NO: 119 - DNA, 1610 bp, Homo sapiens
  misc_feature: Template ID: 215481.15
ctgagccctcgagcagggcggatcggccgctgcctgcttaaagctggggccgccaggagtggcgatccgcctgcggatctgcagctgggcaccggccgcaacgcccgccccgcgacggcagggactgaagggactcctgaatgtccgcgggacgtgtcgcggcggcgcccagcacggaggaggcaggcagggagggaataaaggctcagggaccggcagttctactctagagcccaccagcctctcagagcctccggtgactggcctgtgtctccccctggatggacatgtggacggcgctgctcatcctgcaagccttgttgctaccctccctggctgatggtgccacccctgccctgcgctttgtagccgtgggtgactggggaggggtccccaatgccccattccacacggcccgggaaatggccaatgccaaggagatcgctcggactgtgcagatcctgggtgcagacttcatcctgtctctaggggacaatttttacttcactggtgtgcaagacatcaatgacaagaggttccaggagacctttgaggacgtattctctgaccgctcccttcgcaaagtgccctggtacgtgctagccggaaaccatgaccaccttggcaatgtctctgcccagattgcatactctaagatctccaagcgctggaacttccccagccctttctaccgcctgcacttcaagatcccacagaccaatgtgtctgtggccatttttatgctggacacagtgacactatgtggcaactcagatgacttcctcagccagcagcctgagaggccccgagacgtgaagctggcccgcacacagctgtcctggctcaagaaacagctggcggcggccaggggaggactacgtgctggtggctggccactaccccgtgtggtccatagccgagcacgggcctacccactgcctggtcaagcagctacggccactgctggccacatacggggtcactgcctacctgtgcggccacgatcacaatctgcagtacctgcaagatgagaatggcgtgggctacgtgctgagtggggctgggaatttcatggacccctcaaagcggcaccagcgcaaggtccccaacggctatctgcgcttccactatgggactgaagactcactgggtggctttgcctatgtggagatcagctccaaagagatgactgtcacttacatcgaggcctcgggcaagtccctctttaagaccaggctgccgaggcgagccaggccctgaactcccatgactgcccagctctgaggcccgatctccactgttgggtgggtgggccctgccgggaccctgctcacaggcaggcttttcctccaacctgtggcgctgcagcagggcaggaaggggaaacacagctgatgaactgtggtgccacatgacccttgtggcacagatgcccacgtatgtgaaacacacatggacatgtgtcccagccacagtgttatgctctgtggctggctcacctttgctgagttccggggtgcaatgggggagggagggagggaaagcttcctcctaaatcaagcatctttctgttactgatgttcaataaaagaatagttgccaaggctgaa

SEQ ID NO: 120 - DNA, 842 bp, Homo sapiens
  misc_feature: Template ID: 885713.30
ccttttttttttttttaaagttttcatctttaatgaaatgactttggaaataacgtacattcccatgacaccaatactacagttttcggagtcacagtaagatacacagaattacatccgtaattaatatgaatgccaacatgtcaagcagtaatttgttacatggcaaacaaaatcaagaaagcaaccatcaaacaaaagagacccatagcttcagacaaggcaaatcccaggatagcatatgagaacagctgctgcttcagcgaagggtttctggcataaccaatgataaggctgccaaagactgttccaataccagcaccagaaccagccactcctactgttgcagcacctgcaccaataaatttggcagcagtatcaatgtctctgctgattgcactggtctgaaactccctttggattagctgagacacaccattctgggccccattaaataccgtagagccctctccagtcctactagcctctggtcgagataacactgatgcagaaattggtctgtatgcaactctggatccagctcggatcagagagggggtgcaggcgagcttggcgcaggcgaacatcttacactcttcgggactgcgcggctggagatattgggtgacaggcgacgtgggctcctctcccgcttcctctctgcggaggaaaagaggcttaaggtcaagtgccctccaggggcctgttcttcccacccaggctccgcaggctcccgtgcacgccgtcagcttgggccccgtgcccagtgaggcgccggcacaatgaatgggtccctactgggcgccgctccgccctggccaggccgggctccctgtgccctc

SEQ ID NO: 121 - DNA, 1888 bp, Homo sapiens
  misc_feature: Template ID: 902700.6
  unsure 1852-1855, 1858, 1863, 1882, 1884: a, t, c, g, or other
agcctactgcagcgtaggcctcgcctcaacggcaggagagcaggcggctgcggttgctgcagccttcagtctccacccggactacgccatgttggggtttgtgggtccgggtggccgctgctccggcctccggggccttggcggagactcaccccttgcagcgtcgctgcccccagctcagctcttactgcgggccgctccgacggcggtccatcctgtcagggactatgcggcgcaaacatctccttcgccaaaagcaggcgccgccaccgggcgcatcgtggcggtcattggcgcagtggtggacgtccagtttgatgagggactaccaccaattctaaatgccctggaagtgcaaggcagggagaccagactggttttggaggtggcccagcatttgggtgagagcacagtaaggactattgctatggatggtacagaaggcttggttagaggccagaaagtactggattctggtgcaccaatcaaaattcctgttggtcctgagactttgggcagaatcatgaatgtcattggagaacctattgatgaaagaggtcccatcaaaaccaaacaatttgctcccattcatgctgaggctccagagttcatggaaatgagtgttgagcaggaaattctggtgactggtatcaaggttgtcgatctgctagctccctatgccaagggtggcaaaattgggctttttggtggtgctggagttggcaagactgtactgatcatggagctaatcaacaatgtcgccaaagcccatggtggttactctgtgtttgctggtgttggtgagaggacccgtgaaggcaatgatttataccatgaaatgattgaatctggtgttatcaacttaaaagatgccacctctaaggtagcgctggtatatggtcaaatgaatgaaccacctggtgctcgtgcccgggtagctctgactgggctgactgtggctgaatacttcagagaccaagaaggtcaagatgtactgctatttattgataacatctttcgcttcacccaggctggttcagaggtgtctgcattattgggccgaatcccttctgctgtgggctatcagcctaccctggccactgacatgggtactatgcaggaaagaattaccactaccaagaagggatctatcacctctgtacaggctatctatgtgcctgctgatgacttgactgaccctgcccctgctactacgtttgcccatttggatgctaccactgtactgtcgcgtgccattgctgagctgggcatctatccagctgtggatcctctagacttccacctctcgtatcatggatcccaacattgttggcagtgagcattacgatgttgcccgtggggtgcaaaagatcctgcaggactacaaatccctccaggatatcattgccatcctgggtatggatgaactttctgaggaagacaagttgaccgtgtcccgtgcacggaaaatacagcgtttcttgtctcagccattccaggttgctgaggtcttcacaggtcatatggggaagctggtacccctgaaggagaccatcaaaggattccagcagattttggcaggtgaatatgaccatctcccagaacaggccttctatatggtgggacccattgaagaagctgtggcaaaagctgataagctggctgaagagcattcatcgtgaggggtctttgtcctctgtactgtctctctccttgcccctaacccaaaaagcttcatttttctgtgtaggctgcacaagagccttgattgaagatatattctttctgaacagtatttaaggtttccaataaaatgtacacccctcaaaaagaatatatcttcaatcaaggnnnntgngcagnctacacagaaaaatgaagnantttg

SEQ ID NO: 122 - DNA, 670 bp, Homo sapiens
  misc_feature: Template ID: 401575.10
ctgcattttacaagatccccaggggatgcatgtgcacagtgaagtctgggaaacactgttgtggaagcttcagaaactgtaacacatggcagaatggagattccttctgttcccaggaggaaaataggaaatgggaaccttaataaatgtttaatgattaggtatttaaaataattgtttaaaacccccagaaaataagcgggcttaagaaaacagaagaaggcacagcggacaccaggactccaaaatggcgtcagttgtaccagtgaaggacaagaaacttctggaggtcaaactgggggagctgccaagctggatcttgatgcgggacttcagtcctagtggcattttcggagcgtttcaaagaggttactaccggtactacaacaagtacatcaatgtgaagaaggggagcatctcggggattaccatggtgctggcatgctacgtgctctttagctactccttttcctacaagcatctcaagcacgagcggctccgcaaataccactgaagaggacacactctgcacccccccaccccacgaccttggcccgagcccctccgtgaggaacacaatctcaatcgttgctgaatcctttcatatcctaataggaattaacctccaaataaaacatgactggtacgtgtgcaaaaaaaaaaaaaaggg

SEQ ID NO: 123 - DNA, 1721 bp, Homo sapiens
  misc_feature: Template ID: 232818.15
  unsure 119, 126: a, t, c, g, or other
cagaggagtagagggcagtactgcgcagtagactgcacaggcgcagtcgaggagctccgctcctttcctccttcagccccgccccgccccatttctgccgaatcacagaagttcaagancggtcanctgatgctacgctgtgcggtacacgtgacaacgggggcgaaggcaggcgcaaggagcaagcgcagattgtgggcggctgtgtcagctgacccaaggggccttcgaggtgccttaggccgcttgccttgctctcagcaatcgctgccgccatggctagtcagtctcaggggattcagcagctgctgcaggccgagaagcgggcagccgagaaggtgtccgaggcccgcaaaagaaagaaccggaggctgaagcaggccaaagaagaagctcaggctgaaattgaacagtaccgcctgcagagggagaaagaattcaaggccaaggaagctgcggcattgggatcccgtggcagttgcagcactgaagtggagaaggagacccaggagaagatgaccatcctccagacatacttccggcagaacagggatgaagtcttggacaacctcttggcttttgtctgtgacattcggccagaaatccatgaaaactaccgcataaatggatagaagagagaagcacctgtgctgtggagtggcattttagatgccctcacgaatatgaagcttagcacagctctagttacattcttatgatatggcattaaattatttccatatattatataataggtccttccactttttggagagtagcaaatctagcttttttgtacagacttagaaattatctaaagatttcatctttttacctcatatttcttaggaatttaatggttatatgttgtctttttttcctatgtcttttggctcaagcaacatgtatatcagtgttgactttttctttcttagatctagtttaaaaaaaaaaaaaccacataacaattctttgaagaaaggaagggattaaataatttttttccctaacactttcttgaaggtcaggggctttatctatgaaaaagtagtaaatagttctttgtaacctgtgtgaagcagcagccagccttaaagtagtccattcttgctaatggttagaacagtgaatactagtggaattgtttgggctgcttttagtttctcttaatcaaaattactagatgatagaattcaagaacttgttacatgtattacttggtgtatcgataatcatttaaaagtaaagactctgtcatgcatttttccccattcttttttttttccctgtctccgtgacaaccagtggttcttcatttttgatcatgcgaaatgcactttgacccagatggtctgcagaacttcacttaggacattagcacacaaatagcacacatatcacatacccatttatatacataattagaaaatgttcctgatacatgtgtcatgtgatttcttccaacaaatgttttggaaaacagcaagcaactagtctgtaggttgtcttttctctagagatccttgtcctgggacagcctggggcaagttattaagcatatttccttcctggtgggctagatgatgtgcattatacctgtagtaccttcatactagcccttacaagttaaatgtcctgtggccatcttagccgaaagtctttggttgcaaaatcttataggtaaaaacagttgaaagaacattatgggatttccttgcttg

SEQ ID NO: 124 - DNA, 901 bp, Homo sapiens
  misc_feature: Template ID: 233103.10
ggagagaagcaagaatatgactttaatttaacatcaacaatgacactgtgtaacagcacagggaagaggtagtggagggagatggtcaggcttcctgttccttaaccagcagagccccagcaacctagaagcgcctcacctagcctcttaatggagtgggaaggagcagggaattggaaatcagtggctcaaaaagtaaagaaggctgatggcaagcctggggagaggcctggaaacgagggaagggctgagggctatgaggagtcccctagcgcaggtcttcggcagtgaacatgcccctggccctgcgcaggatggagtccttggcggcggcataggggagctccttggaggggatctccaggacagcggggatggactgctggtgggcgtccagggcatgccgcaccatctctgcgatgtactggttgatgaggatgatgccaatgtcatcccggtttagaaattgcagagatggtgcggcatgccctggacgcccaccagcagtccatccccgctgtcctggagatcccctccaaggagcacccatatgacgccgccaaggactccatcctgcgcagggccaggggcatgttcactgccgaagacctgcgctaggggactcctcatagccctcagcccttccctcgtttccaggcctctccccaggcttgccatcagccttctttactttttgagcctctgatttccaattccctgctccttcccactccattaagaggctaggtgaggcgcttctaggttgctggggctctgctggttaaggaacaggaagcctgaccatctccctccactacctcttccctgtgctgttacacagtgtcattgttgatgttaaattaaagtcatattcttgcttctcaaaaaaaaaaaaaaaggg

SEQ ID NO: 125 - DNA, 3640 bp, Homo sapiens
  misc_feature: Template ID: 234313.13
  unsure 185: a, t, c, g, or other
agagaagtgttttctatcatagacaccacaggggaaagtttggggatgaaggagagcttaaaggtgtttcaattaagttagaaaactgacacaggctgttgagaattctttgccacttttcccaccccaaaacagcatggggcctgacatcttctgccctggtcccctttctcttgatgctaaanctctttatttcaccaaccagtatttctgattttcttcttgatactggattttaaaaccttagaagtctataaatactgcattcagactttccacatcaagagaaaggggaccagggcagaagatgtcaggccccatgctgttttggggtgggaaaagtggcaaagaattctcaacagcctgtgtcagttttctaacttaattgaaacacctttaagctctccttcatccccaaactttcccctatggtgtctatgatagaaaaacacttctctctcatatatgtcccatcactagggagccagggggaagggagtgggcattacacaggcaagccaaactttttattcagccagaaaatggatttctgattcagtttaatggtaaggagttgtgtaaaaccgtaccaagtcctgcttcttcctcagagtgagctgggctgcatttttgtgactggaagcatttctcataatggtgaattaagcactataaaaaaataaagtcaatcccatctctatgagtagcataagagctgcttccaagaacccagggatgcccacatcccataacccacccagacacggccaattcctcatagacagctacataaaaccctttcgtcaacttgttttggggggtgagagagaggcagtgcttagggaagatgtaggatggattttttttattcctgccactaccaaaaactataaatctacacacacactcacacgcacatacatgtccatttttaagaaagcttttcctccctgtgactacaggaacccagaatccagcctccctcaggctgagagacgatgcctattaacggcacagatctagcatatcaacatactatagaaggctcctgtgttgtctcacaagctgagagggcagggcaaagaagtggacactcatgggggacttgctttttgtcttaaatccaatctactcagtaacacttgcaggtccaggggctgggagaggttctgtgggcacaacgtggtggacgacctgatggtcccagcccactgtggtaagcagggagtgattgagcggggaccaagtcgcatctctcacaaagtctctgtgggcttggcttctaaacaactcagaaaggcttgagtccagcacagcaagtgagcagtcttcactgagagaggccaggaagggaacactgtgtggggagaacaccagcccagtgacacactgggagtgtacagctgagctcaggacacagcttgtactcttggtgtccacaagggagactgtcccattctcatcaccaaagacaaagacttcactttgctgaggatgccaagccagcgaggtaggaaggtagccaggcgcactgcagccaatctgtgatgctggcttgggacagcgggtatcccagagtaaaattctattgtcctcgctgcatgaaagaaacacagagtccttgtgaggagaggcagcaacacaagtgacctgagcagcatgagctcggtatgaactcagtaccacctgctgagcaaggtcccaaaccttgatgcagatgtctttgctaccactgacagcttgtgtgccagagctcaagacactgactgtagacacaatgtcatcatgctcatacttgcagaacttgctgacaataagtgtctcattctcatctagttcccacaattcaacagcacctgaatcggaggccactagaatacctctctccccaacccaagtgaggtcagccactccagcctccgtttggactccggcggagcagaagccttcgttgggggcggcacaggggtccttaaaaagccagagggagccggcccagcagcgcccactcaggctggaggccccgaggagaagcgccccatcggaccggtaccgcgcagcctccaactgccgttccatgcaggcgggcgcatttgggggaagattccactcccgggccgccgggggcactagggggggtggggtttccttccgcatctccacggttccaactccaacctagactcaaactggacgccggccggagactccgctccggcagcaaaccccacgtggtgcacctctgagcctccgcccctctcccgagggaaccgcaaactcttaatttttcgggaaaattggttctaatggtcccatcctgctttccggctgtcgccctcatgcgataggctctcagcgttacttgactcttctcgcgataattttttttaaaaatctcccaaggaaagttgaaggaagagtacaaaattttcatctcgcgagacttgtgagcggccatcttggtcctgccctgacagattctcctatcggggtcacaggggacgctaagattgctacctggactttcgttgaccatgctgtcccgggtggtactttccgccgccgccacagcggcccccctctctgaagaatgcagccttcctaggtccaggggtattgcaggcaacaaggacctttcatacagggcagccacaccttgtccctgtaccacctcttcctgaatacggaggaaaagttcgttatggactgatccctgagggaattcttccagtttctttatcctaaaactggtgtaacaggaccctatgtactcggaactgggcttatcttgtacgctttatccaaagaaatatatgtgattagcgcagagaccttcactgccctatcagtactaggtgtaatggtctatggaattaaaaaatatggtccctttgttgcagactttgctgataaactcaatgagcaaaaacttgcccaactagaagaggcgaagcaggcttccatccaacacatccagaatgcaattgatacggagaagtcacaacaggcactggttcagaagcgccattacctttttgatgtgcaaaggaataacattgctatggctttggaagttacttaccgggaacgactgtatagagtatataaggaagtaaagaatcgcctggactatcatatatctgtgcagaacatgatgcgtcgaaaggaacaagaacacatgataaattgggtggagaagcacgtggtgcaaagcatctccacacagcaggaaaaggagacaattgccaagtgcattgcggacctaaagctgctggcaaagaaggctcaagcacagccagttatgtaaatgtatctatcccaattgagacagctagaaacagttgactgactaaatggaaactagtctatttgacaaagtctttctgtgttggtgtctactgaagttatagtttacccttcctaaaaatgaaaagtttgtttcatatagtgagagaacgaaatctctatcggccagtcagatgtttctcatccttcttgctctgcctttgagttgttccgtgatcacttctgaataagcagtttgcctttataaaaacttgctgcctgactaaagattaacaggttatagtttaaatttgtaattaattctaccatcttgcaataaagtgacaattgaatg

SEQ ID NO: 126 - DNA, 1697 bp, Homo sapiens
  misc_feature: Template ID: 234313.14
tttttttgaattgatatataatactccatttagttattttaagagtactagaaagctttacatatctcataacctatcagccagaaacagttcaccactgaatggtctcataaacaagacagtagttcaatgacatctttaatttttacccatatgacaaaagctgagtatttcagagaattatacaacttgaaaaaccctgtttcattcaattgtcactttattgcaagatggtagaattaattacaaatttaaactataacctgttaatctttagtcaggcagcaagtttttataaaggcaaactgcttattcagaagtgatcacggaacaactcaaaggcagagcaagaaggatgagaaacatctgactggccgatagagatttcgttctctcactatatgaaacaaacttttcatttttaggaagggtaaactataacttcagtagacaccaacacagaaagactttgtcaaatagactagtttccatttagtcagtcaactgtttctagctgtctcaattgggatagatacatttacataactggctgtgcttgagccttctttgccagcagctttaggtccgcaatgcacttggcaattgtctccttttcctgctgtgtggagatgctttgcaccacgtgcttctccacccaatttatcatgtgttcttgttcctttcgacgcatcatgttctgcacagatatatgatagtccaggcgattctttacttccttatatactctatacagtcgttcccggtaagtaacttccaaagccatagcaatgttattcctttgcacatcaaaaaggtaatggcgcttctgaaccagtgcctgttgtgacttctccgtatcaattgcattctggatgtgttggatggaagcctgcttcgcctcttctagttgggcaagtttttgctcattgagtttatcagcaaagtctgcaacaaagggaccatattttttaattccatagaccattacacctagtactgatagggcagtgaaggtctctgcgctaatcacatatatttctttggataaagcgtacaagataagcccagttccgagtacatagggtcctaaaagaagaaagagttattttatgaagggatatgctatgcctaaaagagggaagatagaaaggtacttctatatttgattagctgaaggcaaagtaatgacttaattagattcaaagacaaaacactggattgggaagcagtatggtagagttgaaagaacaaagatatggactcagggaaatctgtatactgactctacaattttaaagaaactgagcaatctaaataatctctgaatttagttccttatttgtaaaatggggacagtaccttcttcagtctgataaatttgagaaataatgttaagcacaataccccgcacagtaaattaaactattctacaaagatgtcagataactttctgaagtaatttgtccagcaaaatatactatttatcgaatgggacactagaccggataaaatttacacaagaaacaagcaaaaaacaactacaaagtgatatgtatataaaaggatgaataaatattaggattctcaattcctgtagcacctaattacaatgcttcaaatatggctttttctttaaccaggccatgtgttctgaaaggatgcaaaccatgatttacatttatttagtctttcctccg

SEQ ID NO: 127 - DNA, 2002 bp, Homo sapiens
  misc_feature: Template ID: 246862.17
  unsure 533, 535-536, 548: a, t, c, g, or other
tgggagttgtggttttacctgagactcctggccgttgagcccctgtgcaaggctggtcgaaggctctggcattgcaagcctcgcttcgttgccacttcccagctcttcccgccttccgcggtataatcaacactacgagagatagagccgcctagaaccaggtctccagaaatgctttgggttcatctttcattgctgcaaggaacttccatgcctctaacactcatcttcaaaagactgggactgctgagatgtcctctattcttgaagagcgtattcttggagctgatacctctgttgatcttgaagaaactgggcgtgtcttaagtattggtgatggtattgcccgcgtacatgggctgaggaatgttcaagcagaagaaatggtagagttttcttcaggcttaaagggtatgtccttgaacttggaacctgacaatgttggtgttgtcgtgtttggaaatgataaactaattaaggaaggagatatagtgaagatgacaggagccattgtggacgttccagttggtgangnnctgttgggtcgngtagttgatgcccttggtaatgctattgatggaaaggtaggtttaatgttcgttagatatagttgcagcttctaacaaacatcaaaactgattatgcttagggtttttctttttattttttaacagggtccaattggttccaagacgcgtaggcgagttggtctgaaagcccccggtatcattcctcgaatttcagtgcgggaaccaatgcagactggcattaaggctgtggatagcttggtgccaattggtcgtggtcagcgtgaactgattattggtgaccgacagactgggaaaacctcaattgctattgacacaatcattaaccagaaacgtttcaatgatggatctgatgaaaagaagaagctgtactgtatttatgttgctattggtcaaaagagatccactgttgcccagttggtgaagagacttacagatgcagatgccatgaagtacaccattgtggtgtcggctacggcctcggatgctgccccacttcagtacctggctccttactctggctgttccatgggagagtattttagagacaatggcaaacatgctttgatcatctatgacgacttatccaaacaggctgttgcttaccgtcagatgtctctgttgctccgccgaccccctggtcgtgaggcctatcctggtgatgtgttctacctacactcccggttgctggagagagcagccaaaatgaacgatgcttttggtggtggctccttgactgctttgccagtcatagaaacacaggctggtgatgtgtctgcttacattccaacaaatgtcatttccatcactgacggacagatcttcttggaaacagaattgttctacaaaggtatccgccctgcaattaacgttggtctgtctgtatctcgtgtcggatccgctgcccaaaccagggctatgaagcaggtagcaggtaccatgaagctggaattggctcagtatcgtgaggttgctgcttttgcccagttcggttctgacctcgatgctgccactcaacaacttttgagtcgtggcgtgcgtctaactgagttgctgaagcaaggacagtattctcccatggctattgaagaacaagtggctgttatctatgcgggtgtaaggggatatcttgataaactggagcccagcaagattacaaagtttgagaatgctttcttgtctcatgtcgtcagccagcaccaagccttgttgggcactatcagggctgatggaaagatctcagaacaatcagatgcaaagctgaaagagattgtaacaaatttcttggctggatttgaagcttaaactcctgtggattcacatcaaataccagttcagttttgtcattgttctagtaaattagttccatttgtaaaagggttactctcatactccttatgtacagaaatcacatgaaaaataaaggttccataatgcgtaaaaaaaaaaaaggg

SEQ ID NO: 128 - DNA, 2848 bp, Homo sapiens
  misc_feature: Template ID: 253969.2
gtcgggacagaggagacaagatggcgctgcgggcgatgcgggggattgtcaacggggccgcacccgagctacccgtgcccaccggtgggccggcggtgggagctcgggagcaggcgctggcagtcagtcggaactacctctcccagcctcgcctcacatacaagacagtatctggagtcaatggtccactagtgatcttagatcatgttaagtttcccaggtatgctgaaattgtccatttgaccttaccggatggcacaaagagaagtgggcaagttctggaagttagtggttccaaggcagtagttcaggtatttgaagggacttcaggtatagatgctaagaaaacgtcctgtgagtttactggggatattctccgaacaccggtgtctgaggatatgcttggtcgggtattcaatggatcgggaaaacccattgacagaggtcctgttgtactggccgaagacttccttgatatcatgggtcagccaatcaaccctcaatgtcgaatctacccagaggaaatgattcagactggcatttcggccatcgatgggatgaacagtattgctagggggcagaaaattcctatcttctctgctgctgggctaccacacaatgagattgcagctcagatctgtcgccaggctggtttggtaaagaaatccaaagatgtagtagactacagtgaggaaaattttgcaattgtatttgctgctatgggtgtaaacatggaaactgcccggttcttcaaatctgactttgaagaaaatggctcaatggacaatgtctgcctctttttgaacttggctaatgacccaaccattgagcgaattatcactcctcgcctggctctaaccacagctgaatttctggcgtaccaatgtgagaaacatgtattggttattctaacagacatgagttcttatgctgaagcacttcgagaggtttcagcagccagggaagaggtacctggtcgacgaggttttccaggttacatgtatacagatttagccacgatatatgaacgcgctgggcgagtggaagggagaaacggctcgattactcaaatccctattctaaccatgcctaatgatgatatcactcaccccatcccagacttgactggctacattacagaggggcagatctatgtggacagacagctgcacaacagacagatttatccacctatcaatgtgctgccctcactatcacggttaatgaagtctgctattggagaagggatgaccaggaaggatcatgccgatgtatctaaccagctatatgcgtgctatgctattggaaaggatgtgcaagccatgaaagctgtcgttggagaagaagcccttacctcagatgatcttctctacttggaatttctgcagaagtttgagaggaacttcattgctcagggtccttacgaaaatcgcactgtctttgagactttggacattggctggcagctactccgaatcttccccaaagaaatgctgaagagaatccctcagagcaccctcagcgaattttaccctcgagactctgcaaagcattagctgctgcttctgcattgctccgcgctcttgtgaaatactggttctgttttctttattccttttgcactctcggttcccacctttgtgttggagtttaccatgttaccctgtaattaaaaacaaagaataggtaacatattgtgccagtgttgcaacgttttaaactgctaacagaccttaaaatatccccctacctgggtcctcagtgctatgtttaaagtgctgcagggatggagtggcgttttcttattgctgtatgtattgtacatagtggagtagttagttacctgataacagtcttgttatttgggtctcttagaccttacctctcaactccctcaagagtaccagtctctgaagttataatgctttggtctctacattaggggcaagatccagtctgagagaagtctcctttgagaagggccaagaggctctttcctgagtgtttgctttcggtttgttggtatgcctgtattgctgggctgtgctgctgctcgaagcagatggttttgactgtctttttgctctttcctatataatgaatagatgagtgaaaggagttttctttttctctttagtacttacgtattgggattcctgtgtcttacagctctccctctccaaataatacacagaatcctgcaactttttgcacagctggtatctgtctggtagcagtgagaccccttgtcttggtgatccttactgggtttccaagcagaggagtcacatgattacaattgccagtagagttgttgtttggggtacaagatgagaagaaagaaaaacctacagcctttctacattctgacatgctaacagtggtttaagtttctaaagtgtttaccagatgctgaaggcaaggggagggagcagaagcacttatgtttacggatattttaaactctgttagagagcagcctttgaaaatccccaatttggttctgctttttgacctctctctaccttttcagggtaatctttgtggcacaaacgatagcatttccaagctttagagttttctgaattcctgcgccttcctgacgtgagccctgagcgatcttctatgcagttctgccatgcgtcctgttggtctctctgtgttctttgttacttgggtgcaatagcaacttccctaccccgtgcattccatctttcatgttgtgtaaagttcttcacttttttctctgagggctgggggttgggggagtcagcatgattatattttaatgtagaaaatgtgacatctggatataaaatgaaaataaatgttaaattaaatggacctt

SEQ ID NO: 129 - DNA, 1184 bp, Homo sapiens
  misc_feature: Template ID: 328615.1
taacaggtactgtttattaactggctagattacaaaaaataattgtggtaggcatgtttattcttctaataagcctgttgatctggtcttccctgttgtcagcatctccaccttctacaaaattggtggtctttttcttcattctaacttgtcgagaggataatttgaagggccacaggaagttatttgcttctttaagcattttccaacagtatagatctcatgaatcagatcctccatgcagatgaggccatatttaccaagagatcgagcaatcaaagtattatctgttggagcaagtagcttcttattcattttgctataaccacatttgtagattagaggagctcggcctgcgctgcgccacgatgtccggggagtcagccaggagcttggggaagggaagcgcgcccccggggccggtcccggagggctcgatccgcatctacagcatgaggttctgcccgtttgctgagaggacgcgtctagtcctgaaggccaagggaatcaggcatgaagtcatcaatatcaacctgaaaaataagcctgagtggttctttaagaaaaatccctttggtctggtgccagttctggaaaacagtcagggtcagctgatctacgagtctgccatcacctgtgagtacctggatgaagcatacccagggaagaagctgttgccggatgacccctatgagaaagcttgccagaagatgatcttagagttgttttctaaggtgccatccttggtaggaagctttattagaagccaaaataaagaagactatgctggcctaaaagaagaatttcgtaaagaatttaccaagctagaggaggttctgactaataagaagacgaccttctttggtggcaattctatctctatgattgattacctcatctggccctggtttgaacggctggaagcaatgaagttaaatgagtgtgtagaccacactccaaaactgaaactgtggatggcagccatgaaggaagatcccacagtctcagccctgcttactagtgagaaagactggcaaggtttcctagagctctacttacagaacagccctgaggcctgtgactatgggctctgaagggggcaggagtcagcaataaagctatgtctgatattttccttcactaaaaaaaaaaaaaaaagcggccgttcgcgatctagaacctag

SEQ ID NO: 130 - DNA, 854 bp, Homo sapiens
  misc_feature: Template ID: 998594.2
gtgtaactggcactgcggctggagggctggtcccacagtgagctacagccctgcccgctggccgtgggagaggcttaaaacaaacgccggaagcaactcccagccccataaagatctgtgaccggcagccccagacctgcctgccttcctgacttctgttccagagcaaaggtcattcagccgcttgaatcagccttttccccccacccggtccccaactttgtttacccgataaggaaggtcagcattcaaagtcaagaagcgccatttatcttcccgtgcgctctacaaatagttccgtgagaaagatggccgggaactcgatcctgctggctgctgtctctattctctcggcctgtcagcaaagttattttgctttgcaagttggaaaggcaagattaaaatacaaagttacgcccccagcagtcactgggtcaccagagtttgagagagtatttcgggcacaacaaaactgtgtggagttttatcctatattcataattacattgtggatggctgggtggtatttcaaccaagtttttgctacttgtctgggtctggtgtacatatatggccgtcacctatacttctggggatattcagaagctgctaaaaaacggatcaccggtttccgactgagtctggggattttggccttgttgaccctcctaggtgccctgggaattgcaaacagctttctggatgaatatctggacctcaatattgccaagaaactgaggcggcaattctaactttttctcttccctttaatgcttgcagaagctgttcccaccatgaaggtaatatggtatcatttgttaaataaaaataaagtctttattctgtttttcttg

SEQ ID NO: 131 - DNA, 2913 bp, Homo sapiens
  misc_feature: Template ID: 220837.3
caccaccttgggtcctcctccctctgcctctgttcagctccaccttgatggtgactaggctgggccatgcggagagggttaggggatagagatgggagctggggagcagggctccactctgggaggggggcagccttgccggatccagggcagagttaagcggccccagctctgctttcctagagctgctgagaacccgggaaatggtgtggaggttccggggagccctgcccctacctggcaaccgcagtgcagcaggcaccaagttctcctgcacattgcgacagtgtgaccctgggctctggcgggcagtaggtggggcctttggacctaccagcagtgagggagttaacacagcagctgactcctctaggcaaggaaaactcccctcagatgctttgctgcctggcctcctgccagcaacaagcaggagctgaaaaccagaagttgaggcgtgagtttggtcactccgtagtgtgcacttggtgagggcagcagctcgccacagctgccagccgtctgtccattcacccatctgtccatctggcagcccgctgttcagacccgtctgtctgtccgcccatctgtaagcccatctctgtcccattgtctatctgaccatctttctcttactgtcctctttgtctagctatctggcctatctgtcgatccatcttcgtgtctgtcttcagcccccacctgtttgtccatctgtccaattacctgtgactctgtgcatcttcttgtccattcatctgcccacccatccgtccctccgtctgcccaccagccgcccctctcctcctgggctgcagagccatggcccggggctacggggccacggtcagcctagtcctgctgggtctggggctggcgctggctgtcattgtgctggctgtggtcctctctcgacaccaggccccatgtggcccccaggcctttgcccacgctgctgttgccgccgactccaaggtctgctcggatattggacgagccatcctccagcagcagggctcacccgtggatgccaccatcgcggctctggtctgcaccagcgtcgtcaaccctcagagcatgggcctgggcggaggggtcatcttcaccatctacaatgtgacaacagggaaggtggaggtcatcaatgcccgggagacggtgccggccagccacgccccgagcctgctggaccagtgtgcacaggctctgccactgggcacaggggcccagtggatcggggtgcccggggagctccgtggctatgccgaggcccaccgccgccatggccgcctgccctgggcgcagctgttccagcccaccatcgcgctgctccgaggggggcatgtggtggcccctgtcctcagccgtttcctgcacaacagcatcctgcggccttccttgcaggcgtcaaccctgcgccagctcttcttcaacgggacagaacccctgaggcctcaggacccactcccatggcctgcactggccaccaccctggagaccgtggccacagagggcgtggaggtcttctacacggggaggctgggccagatgctggtggaggacattgccaaggaagggagccagctgacgctgcaggacctggccaagttccagcccgaggtggtggatgccctggaggtgcccctgggggactataccctgtactcaccaccgccgcctgcagggggtgccattctcagctttatcctcaacgtgctaagagggttcaacttctcaacagagtctatggccaggcctgaagggagggtgaacgtgtaccaccaccttgtagagacgctcaagtttgccaaggggcagaggtggaggctgggggaccctcgaagccacccgaagctccagaatgcctcccgggacctgctgggggagaccctgggcccagctcatccgccaacagatcgatggccggggggaccaccagctcagccactacagcttggccgaggcctggggccacgggacaggcacgtcccatgtgtctgtgctgggggaggatggcagcgccgtggctgccaccagcaccatcaacacaccctttggagcgatggtgtattcaccacggacaggcatcatcctcaacaacgagctcctggacttatgcgagcgatgcccccggggttccggcaccaccccctcacctgtgagtggagacagggtgggtggagctcccggaaggtgctggcccccagttccaggcgagcgttccccatcctccatggtgccctccatcttgatcaacaaagcccaggggtcgaagctagtgattggcggggctggcggggagctcatcatctctgctgtggcccaggccatcatgagcaagctgtggcttggctttgacctgagagcggccattgcagcccccatcctgcatgtcaacagcaagggctgtgtggagtacgagcccaacttcagccaggaggtgcagaggggactccaagaccgtggccagacccagacccagaggcccttcttcctgaacgtggtccaggctgtgtcccaggagggggcctgtgtgtacgccgtctcggacctgaggaagagtggggaggccgcaggctactaagacactgctctgcccagagctgaagtctggccccaccatgagtcctgtgtccaggccggacatggctgggggaccaactactctggcaggatctggacccctggcaggggagtccagctgagagtggaagaggtggcggggaccagctgggcagatgagaggctgagcctcatccctaaccccctttcccagagcccctggtggtcctgaaccggcccctctatccctccgcaggcctcttgcctggggccactctcccaccctctcgatctgtatatcctccagtccaagattaaagaagaggcggactgtgaaaaaaaaaacaagggggg

SEQ ID NO: 132 - DNA, 5279 bp, Homo sapiens
  misc_feature: Template ID: 410296.1
gggtccgaccgcgctcgccttccttgcagccgcgcctcggccccatggacgccctgtgcggttccggggagctcggctccaagttctgggactccaacctgtctgtgcacacagaaaacccggacctcactccctgcttccagaactccctgctggcctgggtgccctgcatctacctgtgggtcgccctgccctgctacttgctctacctgcggcaccattgtcgtggctacatcatcctctcccacctgtccaagctcaagatggtcctgggtgtcctgctgtggtgcgtctcctgggcggaccttttttactccttccatggcctggtccatggccgggcccctgcccctgttttctttgtcacccccttggtggtgggggtcaccatgctgctggccaccctgctgatacagtatgagcggctgcagggcgtacagtcttcgggggtcctcattatcttctggttcctgtgtgtggtctgcgccatcgtcccattccgctccaagatccttttagccaaggcagagggtgagatctcagaccccttccgcttcaccaccttctacatccactttgccctggtactctctgccctcatcttggcctgcttcagggagaaacctccatttttctccgcaaagaatgtcgaccctaacccctaccctgagaccagcgctggctttctctcccgcctgtttttctggtggttcacaaagatggccatctatggctaccggcatcccctggaggagaaggacctctggtccctaaaggaagaggacagatcccagatggtggtgcagcagctgctggaggcatggaggaagcaggaaaagcagacggcacgacacaaggcttcagcagcacctgggaaaaatgcctccggcgaggacgaggtgctgctgggtgcccggcccaggccccggaagccctccttcctgaaggccctgctggccaccttcggctccagcttcctcatcagtgcctgcttcaagcttatccaggacctgctctccttcatcaatccacagctgctcagcatcctgatcaggtttatctccaaccccatggccccctcctggtggggcttcctggtggctgggctgatgttcctgtgctccatgatgcagtcgctgatcttacaacactattaccactacatctttgtgactggggtgaagtttcgtactgggatcatgggtgtcatctacaggaaggctctggttatcaccaactcagtcaaacgtgcgtccactgtgggggaaattgtcaacctcatgtcagtggatgcccagcgcttcatggaccttgcccccttcctcaatctgctgtggtcagcacccctgcagatcatcctggcgatctacttcctctggcagaacctaggtccctctgtcctggctggagtcgctttcatggtcttgctgattccactcaacggagctgtggccgtgaagatgcgcgccttccaggtaaagcaaatgaaattgaaggactcgcgcatcaagctgatgagtgagatcctgaacggcatcaaggtgctgaagctgtacgcctgggagcccagcttcctgaagcaggtggagggcatcaggcagggtgagctccagctgctgcgcacggcggcctacctccacaccacaaccaccttcacctggatgtgcagccccttcctggtgaccctgatcaccctctgggtgtacgtgtacgtggacccaaacaatgtgctggacgccgagaaggcctttgtgtctgtgtccttgtttaatatcttaagacttccacacaacatgctgccccagttaatcagcaacctgactcaggccagtgtgtctctgaaacggatccagcaattcctgagccaagaggaacttgacccccagagtgtggaaagaaagaccatctccccaggctattccatcacatacacagtggcaccttcacctgggcccaggacctgccccccactctgcacagcctagacatccaggtcccgaaaggggcactggtggccgtggtggggcctgtgggctgtgggaagtcctccctggtgtctgccctgctgggagagatggagaagctagaaggcaaagtgcacatgaagggctccgtggcctatgtgccccagcaggcatggatccagaactgcactcttcaggaaaacgtgcttttcggcaaagccctgaaccccaagcgctaccagcagactctggaggcctgtgccttgctagctgacctggagatgctgcctggtggggatcagacagagattggagagaagggcattaacctgtctgggggccagcggcagcgggtcagtctggctcgagctgtttacagtgatgccgatattttcttgctggatgacccactgtccgcggtggactctcatgtggccaagcacatctttgaccacgtcatcgggccagaaggcgtgctggcaggcaagacgcgagtgctggtgacgcacggcattagcttcctgccccagacagacttcatcattgtgctagctgatggacaggtgtctgagatgggcccgtacccagccctgctgcagcgcaacggctcctttgccaactttctctgcaactatgcccccgatgaggaccaagggcacctggaggacagctggaccgcgttggaaggtgcagaggataaggaggcactgctgattgaagacacactcagcaaccacacggatctgacagacaatgatccagtcacctatgtggtccagaagcagtttatgagacagctgagtgccctgtcctcagatggggagggacagggtcggcctgtaccccggaggcacctgggtccatcagagaaggtgcaggtgacagaggcgaaggcagatggggcactgacccaggaggagaaagcagccattggcactgtggagctcagtgtgttctgggattatgccaaggccgtggggctctgtaccacgctggccatctgtctcctgtatgtgggtcaaagtgcggctgccattggagccaatgtgtggctcagtgcctggacaaatgatgccatggcagacagtagacagaacaacacttccctgaggctgggcgtctatgctgctttaggaattctgcaagggttcttggtgatgctggcagccatggccatggcagcgggtggcatccaggctgcccgtgtgttgcaccaggcactgctgcacaacaagatacgctcgccacagtccttctttgacaccacaccatcaggccgcatcctgaactgcttctccaaggacatctatgtcgttgatgaggttctggcccctgtcatcctcatgctgctcaattccttcttcaacgccatctccactcttgtggtcatcatggccagcacgccgctcttcactgtggtcatcctgcccctggctgtgctctacaccttagtgcagcgcttctatgcagccacatcacggcaactgaagcggctggaatcagtcagccgctcacctatctactcccacttttcggagacagtgactggtgccagtgtcatccgggcctacaaccgcagccgggattttgagatcatcagtgatactaaggtggatgccaaccagagaagctgctacccctacatcatctccaaccggtggctgagcatcggagtggagttcgtggggaactgcgtggtgctctttgctgcactatttgccgtcatcgggaggagcagcctgaacccggggctggtgggcctttctgtgtcctactccttgcaggtgacatttgctctgaactggatgatacgaatgatgtcagatttggaatctaacatcgtggctgtggagagggtcaaggagtactccaagacagagacagaggcgccctgggtggtggaaggcagccgccctcccgaaggttggcccccacgtggggaggtggagttccggaattattctgtgcgctaccggccgggcctagacctggtgctgagagacctgagtctgcatgtgcacggtggcgagaaggtggggatcgtgggccgcactggggctggcaagtcttccatgaccctttgcctgttccgcatcctggaggcggcaaagggtgaaatccgcattgatggcctcaatgtggcagacatcggcctccatgacctgcgctctcagctgaccatcatcccgcaggaccccatcctgttctcggggaccctgcgcatgaacctggaccccttcggcagctactcagaggaggacatttggtgggctttggagctgtcccacctgcacacgtttgtgagctcccagccggcaggcctggacttccagtgctcagagggcggggagaatctcagcgtgggccagaggcagctcgtgtgcctggcccgagccctgctccgcaagagccgcatcctggttttagacgaggccacagctgccatcgacctggagactgacaacctcatccaggctaccatccgcacccagtttgatacctgcactgtcctgaccatcgcacaccggcttaacactatcatggactacaccagggtcctggtcctggacaaaggagtagtagctgaatttgattctccagccaacctcattgcagctagaggcatcttctacgggatggccagagatgctggacttgcctaaaatatattcctgagatttcctcctggcctttcctggttttcatcaggaaggaaatgacaccaaatatgtccgcagaatggacttgatagcaaacactgggggcaccttaagattttgcacctgtaaagtgccttacagggtaactgtgctgaatgctttagatgaggaaatgatccccaagtggtgaatgacacgcctaaggtcacagctagtttgagccagttagactagtccccggtctcccgattcccaactgagtgttatttgcacactgcactgttttcaaataacgattttatgaaatgacctctgtcctccctctgatttttcatattttctaaagtttcgtttctgttttttaataaaaagctttttcctcctggaacagaagacagctgctgggtcaggccacccctaggaactcagtcctgtactctggggtgctgcctgaatccattaaaaatgggagtactgatgaaataaaactacatggtcaacagtatatacacagtagtctttttgcacttgttcacaaggtttggggattaggatctttggaggaggccaagaggaagactttctacacatgtacatggttgtagttacctgaacttcagacccaagagctcttggctgcaaatattgccttcac

SEQ ID NO: 133 - DNA, 4466 bp, Homo sapiens
  misc_feature: Template ID: 218849.9
  unsure 4329-4405: a, t, c, g, or other
aagtgacccagggagacaaacacttggagatacttggggctgagtttgagcaagactccctaacctgtgtctggacaagtctgatgtcctgtgtggcccaagaagaactgaccccgtgtctggagctcccaccgttattgcatccctgctgtggctcacctgctgctgtctccaggagcccctgagaagatttgcctcctctcccctgctaagctccaggtcctgagattgaattaggggctggagctcactgcactccagcagtcatgggacccaggatagggccagcgggtgaggtaccccaaggtaccaggacaaggaaaccaaagccacaatgggcacagaaaacacacctggaaggcaaagcaagcccagaccctcaggacgttgcgggccaagtgtgttccataacatcaagctgttcgttctgtgccacagcctgctgcagctggcgcacgtcatgatctccggctacctaaagagctccatctccacagtggagaagcgcttcggcctctccagccagacgtcggggctgctggcctccttcaacgaggtggggaacacagccttgattgtgtttgtgagctattttggcagccgggtgcaccgaccccgaatgattggctatggggctatccttgtggccctggcgggcctgctcatgactctcccgcacttcatctcggagccataccgctacgacaacaccagccctgaggatatgccacaggacttcaaggcttccctgtgcctgcccacaacctcggccccagcctcggccccctccaatggcaactgctcaagctacacagaaacccagcatctgagtgtggtggggatcatgttcgtggcacagaccctgctgggcgtgggcggggtgcccattcagccctttggcatctcctacatcgatgactttgcccacaacagcaactcgcccctctacctcgggatcctgtttgcagtgaccatgatggggccaggcctggcctttgggctgggcagcctcatgctgcgcctttatgtggacattaaccagatgccagaaggtggtatcagcctgaccataaaggacccccgatgggtgggtgcctggtggctgggtttcctcatcgctgccggtgcagtggccctggctgccatcccctacttcttcttccccaaggaaatgcccaaggaaaaacgtgagcttcagtttcggcgaaaggtcttagcagtcacagactcacctgccaggaagggcaaggactctccctctaagcagagccctggggagtccacgaagaagcaggatggcctagtccagattgcaccaaacctgactgtgatccagttcattaaagtcttccccagggtgctgctgcagaccctacgccaccccatcttcctgctggtggtcctgtcccaggtatgcttgtcatccatggctgcgggcatggccaccttcctgcccaagttcctggagcgccagttttccatcacagcctcctacgccaacctgctcatcggctgcctctccttcccttcggtcatcgtgggcatcgtggtgggtggcgtcctggtcaagcggctccacctgggccctgtgggatgcggtgccctttgcctgctggggatgctgctgtgcctcttcttcagcctgccgctcttctttatcggctgctccagccaccagattgcgggcatcacacaccagaccagtgcccaccctgggctggagctgtctccaagctgcatggaggcctgctcctgcccattggacggctttaaccctgtctgcgacccagcactcgtgtggaatacatcacaccctgccacgcaggctgctcaagctgggtggtccaggatgctctggacaacagccaggttttctacaccaactgcagctgcgtggtggagggcaaccccgtgctggcaggatcctgcgactcaacgtgcagccatctggtggtgcccttcctgctcctggtcagcctgggctcggccctggcctgtctcacccacacaccctccttcatgctcatcctaagaggagtgaagaaagaagacaagactttggctgtgggcatccagttcatgttcctgaggattttggcctggatgcccagccccgtgatccacggcagcgccatgcgacaccacctgtgtgcactgggccctgagctgtgggcgtcgagctgtctgtcgctactacaataatgacctgctccgaaaccggttcatcggcctccagttcttcttcaaaacaggttctgtgatctgcttcgccttagttttggctgtcctgaggcagcaggacaaagaggcaaggaccaaagagagcagatccagccctgccgtagagcagcaattgctagtgtcggggccagggaagaagccagaggattcccgagtgtgagctgtcttggggccccacctgggccaagagtagcagccacagcagtacctcctctgagtcctttgcccaagattgggtgtcaagagccctgtgttccattctggctcctccactaaattgctgtgtgacttcaggcaagacattgatcctctctcagcctttgcttgctagtctgaaccaaagagttgtttgggcatttgctgtgttggccatttctggagcaagagggtcttcttcctccttcccccagccagccagctgtcctggggccaggctttcctgggtggaaagaagtatacctttccctggggccctaggatagcaaagtgagccatagtgggccaggctgccctccatgctgggccccagcccaggtctgcactcgcctggatcaccttctttgagccttagccatctcctgtcaggtaggaatgaacttgccagccttcaggctcgttcagctatgaccatctgtgcggtcagggtacactcagctctcctccccaactccagcagcctttaagaagtgtccctttggcgccccctggaggcagagcactgagctggaccctgggtagactcccacagggaggacggagctggcctcaggagtgggacacccagacttggcagggccttcaagaggcctgtgtgggggccccaggaatccttagctgaagcggggagactcactctccatctcaggaaattctagcccttgccctcagggagccacggttgagggtgaggcccaacacctgccttagggccctgggtgggcaagtctgggccctggggtagggagggagactcaggcccacacttgggtattttctaatttcagacaaacacacactcagcgcgcactcactgattcctacacattgccaagatttcacacatgtgaccaggggccaccaaagtccctgtgacctttgtgactaggatcctaatttctctattttctcctgggtgcctgggtctgtgtcacctggggcagtgtggataatgtttagttctgtgacactgttttttgggggtggcacctggttctccgatgcctgggctggtgtcaggcccaggactgtagtgctgggagcagtaaagctcagctctgtgtaatgagtgatgctatggcttgctcgtgtcttatgatccaatccttttctacatcagcccttgttttgttttatggctagtcttatctggcctggttatttccttgcggggaggagagggtttgctaatctgctcccagcccaacctattaccaccccacctcgctgggacctactgctcgggaggcagcagacagggagccaccagcagtggcttcctggccctgtgctgggggtggggggaagctgggggcacatgtggcccttgccttctgagcagctcccagtgccagggctttgagactttcccacatgataaaagaaaagggaggtacagaagttccaattccctttttattttgctggttggtatctgtaaatgtttaataaatatctgagcatgtatctatcaacgccaagaatttcaaagtctccttcaacaatatgaggcttttaggatgtttatattccttcatccctcttgtttcccaggttttgcagggaaaaaaagtctggaattatagatacagcttattattaaatttgttcttgcataatgtctcttctattacaaaaattctttcttcataaactgcattagaggtttgcaacaaccacatcatttccattaacttagatttaggttttactggattcattgctcaccattattgcttgtatattacatcttttccaatctttatattctggtctaatttttgtttgagtgtcttcgtctactaatggtttcaaaaatggaataaggtcatgaggatttctgaatcctcacctgtccaaattgtcattcannnnnnnnnnnnnnnnnnnnnnnnnnnnnnnnnnnnnnnnnnnnnnnnnnnnnnnnnnnnnnnnnnnnnnnnnnnnncaaggttggatgtgtagaccttgtgggaactgaaggtttataatttgaggagccctcttta

SEQ ID NO: 134 - DNA, 542 bp, Homo sapiens
  misc_feature: Template ID: 218849.15
  unsure 156, 390-391, 524: a, t, c, g, or other
tgatgattgtgctggtggtggtgatcatgacagagacaacaataacaatcatcacatcgtgatggtaatgtcgtgactaaatttgtcatttagtcacaacgatatgggtgatgtgaatgagggtgatatttaagctgaaaggaatagaaatgatgntgatgattatggtagtgattttcctaaaaatgttggtgattattatgatgttaatagtggtcatgacaactaacccatgtggatactggtgatgacaaagtttaaccacaagaattttattcatcctttcaaaaccacttgttgggtacctatagggccaagaacaaatggaacactgcaggcctcaattgctcctgaagagatgacagggctctcaccctctcctctccaagnnctctcctccccagcccacaggccaactctgagtggggttgctggcatccagcggactgtccttggttttgtgtctccttcagggcaaggactctccctctaagcagagccctggggagtccacgaagaagcangatggcctagtccagatt

SEQ ID NO: 135 - DNA, 2132 bp, Homo sapiens
  misc_feature: Template ID: 218849.16
gcaagggagagacagaaggagcaagtgacccagggagacaaacacttggagatacttggggctgagtttgagcaagactccctaacctgtgtctggacaagtctgatgtcctgtgtggcccaagaagaactgaccccgtgtctggagctcccaccgttattgcatccctgctgtggctcacctgctgctgtctccaggagcccctgagaagatttgcttcctctcccctgctaagctccaggtcctgagattgaattaggggctggagctcactgcactccagcagtcatgggacccaggatagggccagcgggtgaggtaccccaggtaccagacaaggaaaccaaagccacaatgggcacagaaaacacacctggaggcaaagccagcccagaccctcaggacgtgcggccaagtgtgttccataacatcaagctgttcgttctgtgccacagcctgctgcagctggcgcagctcatgatctccggctacctaaagagctccatctccacagtggagaagcgcttcggcctctccagccagacgtcggggctgctggcctccttcaacgaggtggggaacacagccttgattgtgtttgtgagctattttggcagccgggtgcaccgaccccgaatgattggctatggggctatccttgtggccctggcgggcctgctcatgactctcccgcacttcatctcggagccataccgctacgacaacaccagccctgaggatatgccacaggacttcaaggcttccctgtgcctgcccacaacctcggccccagcctcggccccctccaatggcaactgctcaagctacacagaaacccagcatctgagtgtggtggggatcatgttcgtggcacagaccctgctgggcgtgggcggggtgcccattcagccctttggcatctcctacatcgatgactttgcccacaacagcaactcgcccctctacctcgggatcctgtttgcagtgaccatgatggggccaggcctggcctttgggctgggcagcctcatgctgcgcctttatgtggacattaaccagatgccagaaggtggtatcagcctgaccataaaggacccccgatgggtgggtgcctggtggctgggtttcctcatcgctgccggtgcagtggccctggctgccatcccctacttcttcttccccaaggaaatgcccaaggaaaaacgtgagcttcagtttcggcgaaaggtcttagcagtcacagactcacctgccaggaagggcaaggactctccctctaagcagagccctggggagtccacgaagaagcaggatggcctagtccagattgcaccaaacctgactgtgatccagttcattaaagtcttccccagggtgctgctgcagaccctacgccaccccatcttcctgctggtggtcctgtcccaggtatgcttgtcatccatggctgcgggcatggccaccttcctgcccaagttcctggagcgccagttttccatcacagcctcctacgccaacctgctcatcggctgcctctccttcccttcggtcatcgtgggcatcgtggtgggtggcgtcctggtcaagcggctccacctgggccctgtgggatgcggtgccctttgcctgctggggatgctgctgtgcctcttcttcagcctgccgctcttctttatcggctgctccagccaccagattgcgggcatcacacaccagaccagtgcccaccctgggctggagctgtctccaagctgcatggaggcctgctcctgcccattggacggctttaaccctgtctgcgaccccagcactcgtgtggaatacatcacaccttgccacgcaggctgctcaagctgggtggtccaggatgctctggacaacagccagagtcctcccacctcccaccctcatgctgggcatcagcatctaaacctgaggctcctccagggagagacctgggctgcactggctggtgcagaagaacctgttgatggtgcatagtccttcagaagccagccaggcaccacctgggcctgagagcccttccagagacccccaggccttggcaggtggagcagtgaactcctgtggatatgggaaccgattcaaatccttcttaggcctctaactga

SEQ ID NO: 136 - DNA, 1402 bp, Homo sapiens
  misc_feature: Template ID: 233319.14
cgcggacggcgttggtttgaagaccttcagcgttgccctggcggagcagagacaggccctcggggtggaggtctttggtttcataagagcctgagagagatttttctaagatatgtgtaacacaccaacgtactgtgacctaggaaaggctgctaaggatgtcttcaacaaaggatatggctttggcatggtcaagatagacctgaaaaccaagtcttgtagtggagtggaattttctacttctggtcatgcttacactgatacagggaaagcatcaggcaacctagaaaccaaatataaggtctgtaactatggacttaccttcacccagaaatggaacacagacaatactctagggacagaaatctcttgggagaataagttggctgaagggttgaaactgactcttgataccatatttgtaccgaacacaggaaagaagagtgggaaattgaaggcctcctataaacgggattgttttagtgttggcagtaatgttgatatagatttttctggaccaaccatctatggctgggctgtgttggccttcgaagggtggcttgctggctatcagatgagttttgacacagccaaatccaaactgtcacagaataatttcgccctgggttacaaggctgcggacttccagctgcacacacatgtgaacgatggcactgaatttggaggttctatctaccagaaggtgaatgagaagattgaaacatccataaaccttgcttggacagctgggagtaacaacacccgttttggcattgctgctaagtacatgctggattgtagaacttctctctctgctaaagtaaataatgccagcctgattggactgggttatactcagacccttcgaccaggagtcaaattgactttatcagctttaatcgatgggaagaacttcagtgcaggaggtcacaaggttggcttgggatttgaactggaagcttaatgtggtttgaggaaagcatcagatttgtccctggaagtgaagagaaatgaacccactatgttttggccttaaaattcttctgtgaaatttcaaaagtgtgaactttttattcttccaaagaattgtaatcctccccacactgaagtctaggggttgcgaatccctcctgagggagatgcttgaaggcatgcctggaagttgtcatgtttgtgccacgtttcagttcagttctgaagtgttattaaatgtgttcctcagcgacagtgtagcgtcatgttagaggagacgatctgacccaccagtttgtacatcacgtcctgcatgtcccacaccattttttcatgaccttgtaatatactggtctctgtgctatagtggaatctttggttttgcatcatagtaaaataaaataaacccatcacatttggaacataaaaa

SEQ ID NO: 137 - DNA, 2091 bp, Homo sapiens
  misc_feature: Template ID: 434763.22
  unsure 1820, 1837, 1881: a, t, c, g, or other
ccagccgctcgctcggctccgctccctggctcggctccctgcctccgcgtcgcagcccccgccgtagccgcctccgagcccgccgccacatcctctgagcagaagatggctgtgccacccacgtatgccgatcttggcaaatctgccagggatgtcttcaccaagggctatggatttggcttaataaagcttgatttgaaaacaaaatctgagaatggattggaatttacaagctcaggctcagccaacactgagaccaccaaagtgacgggcagtctggaaaccaagtacagatggactgagtacggcctgacgtttacagagaaatggaataccgacaatacactaggcaccgagattactgtggaagatcagcttgcacgtggactgaagctgaccttcgattcatccttctcacctaacactgggaaaaaaaatgctaaaatcaagacagggtacaagcgggagcacattaacctgggctgcgacatggatttcgacattgctgggccttccatccggggtgctctggtgctaggttacgagggctggctggccggctaccagatgaattttgagactgcaaaatcccgagtgacccagagcaactttgcagttggctacaagactgatgaattccagcttcacactaatgtgaatgacgggacagagtttggcggctccatttaccagaaagtgaacaagaagttggagaccgctgtcaatcttgcctggacagcaggaaacagtaacacgcgcttcggaatagcagccaagtatcagattgaccctgacgcctgcttctcggctaaagtgaacaactccagcctgataggtttaggatacactcagactctaaagccaggtattaaactgacactgtcagctcttctggatggcaagaacgtcaatgctggtggccacaagcttggtctaggactggaatttcaagcataaatgaatactgtacaattgtttaattttaaactattttgcagcatagctaccttcagaatttagtgtatcttttaatgttgtatgtctgggatgcaagtattgctaaatatgttagccctccaggttaaagttgattcagctttaagatgttacccttccagaggtacagaagaaacctatttccaaaaaaggtcctttcagtggtagactcggggagaacttggtggcccctttgagatgccaggtttcttttttatctagaaatggctgcaagtggaagcggataatatgtaggcactttgtaaattcatattgagtaaatgaatgaaattgtgatttcctgagaatcgaaccttggttccctaaccctaattgatgagaggctcgctgcttgatggtgtgtacaaactcacctgaatgggacttttttagacagatcttcatgacctgttcccaccccagttcatcatcatctcttttacaccaaaaggtctgcagggtgtggtaactgtttcttttgtgccattttggggtggagaaggtggatgtgatgaagccaataattcaggacttattccttcttgtgttgtgttttttttttgcccttgcaccagagtatgaaatagcttccaggagctccagctataagcttggaagtgtctgtgtgattgtaatcacatggtgacaacactcagaatctaaattggacttctgttgtattctcaccactcaatttgttttttagcagtttaatgggtacattttagagtcttccattttgttggaattagatcctccccttcaaatgctgtaattaacaacacttaaaaaacttgaataaaatattgaaacctcaaaaagtnaaaagcccacataatgnagaaatagttgcagtttatatgtacataaaagagtagtatccanaatatataaagaactccagcaagtcaacaatgaaacgacctaattaaacagacatttttcttcaaaaatagacaaatggctaataatcctacgagaagatttacattaaccattaggtaaatgaaaatctaaactatgatgagacactacttcatatacaacttggatggctacagccaaaataacaacatgctttggtgccaagaagtg

SEQ ID NO: 138 - DNA, 735 bp, Homo sapiens
  misc_feature: Template ID: 434763.18
ggctcggctccctgcctccgcgtcgcagcccccgccgtagccgcctccgagcccgccgccacatcctctgagcagaagatggctgagccacccacgtatgccgatcttggcaaatctgccagggatgtcttcaccaagggctatggaatttacaagctcaggctcagccaacactgagaccaccaaagtgacgggcagtctggaaaccaagtacagatggactgagtacggcctgacgtttacagagaaatggaataccgacaatacactaggcaccgagattactgtggaagatcagcttgcacgtggactgaagctgaccttcgattcatccttctcacctaacactgggaaaaaaaaatgctaaaatcaagacagggtacaagcgggagcacattaacctgggctgcgacatggatttcgacattgctgggccttccatccggggtgctctggtgctaggttacgagggctggctggccggctaccagatgaattttgagactgcaaaatcccgagtgacccagagcaactttgcagttggctacaagactgatgaattccagcttcacactaatgtgaatgacgggacagagtttggcggctccatttaccagaaagtgaacaagaagttggagaccgctgtcaatcttgcctggacagcaggaaacagtaacacgcgcttcggaatagcagccaagtatcagattgaccctgacgcctgcttctcggcta

SEQ ID NO: 139 - DNA, 2370 bp, Homo sapiens
  misc_feature: Template ID: 336954.1
ggcggctccgggaggcagagcgggctccccgggcgacttccaggcccctctcgcgtcctcgccccggacccgtgggcagccgggggggacggaagccgcggccgggccaactccgaggcggggacgccgcgacgggaacttgaggtgggaactttgcgcgctgcagcctcgccgggcgccaccgaagcgcgaaccggaccccgagcctgcaaactcgggctcgggggcggctgcacgtggccgtggccctgaactccctgcgggggcctcgaaacccgcctgcggggaggccagggcgacagaggactcgggagtcaccgctggtgcgtggcggcgtggagcgcgcttgttacggccaagggagcaggctgcctaatgaaggagccaggcttgcacacagacaattctagaactggtggcccgagagggatgtgaaggcccaaaatgaccctcttaccgggagacaattctgactacgactacagcgcgctgagctgcacctcggacgcctccttccacccggccttcctcccgcagcgccaggccatcaagggcgcgttctaccgccgggcgcagcggctgcggccgcaggatgagccccgccagggctgtcagcccgaggaccgccgccgtcggatcatcatcaacgtaggcggcatcaagtactcgctgccctggaccacgctggacgagttcccgctgacgcgcctgggccagctcaaggcctgcaccaacttcgacgacatcctcaacgtgtgcgatgactacgacgtcacctgcaacgagttcttcttcgaccgcaacccgggggccttcggcactatcctgaccttcctgcgcgcgggcaagctgcggctgctgcgcgagatgtgcgcgctgtccttccaggaggagctgctgtactggggcatcgcggaggaccacctggacggctgctgcaagcgccgctacctgcagaagattgaggagttcgcggagatggtggagcgggaggaagaggacgacgcgctggacagcgagggccgcgacagcgagggcccggccgagggcgagggccgcctggggcgctgcatgcggcgactgcgcgacatggtggagaggccgcactcggggctgcctggcaaggtgttcgcctgcctgtcggtgctcttcgtgaccgtcaccgccgtcaacctctccgtcagcaccttgcccagcctgagggaggaggaggagcagggccactgttcccagatgtgccacaacgtcttcatcgtggagtcggtgtgcgtgggctggttctccctggagttcctcctgcggctcattcaggcgcccagcaagttcgccttcctgcggagcccgctgacgctgatcgacctggtggccatcctgccctactacatcacgctgctggtggacggcgccgccgcgggccgtcgcaagcccggcgcgggcaacagctacctggacaaggtggggctggtgctgcgcgtgctgcgggcgctgcgcatcctgtacgtgatgcgcctggcgcgccactccctggggctgcagacgctggggctcacggcccgccgctgcacccgcgagttcgggctcctgctgctcttcctctgcgtggccatcgccctcttcgcgcccctgctctacgtcatcgagaacgagatggccgacagccccgagttcaccagcatccctgcctgctactggtgggctgtcatcaccatgacgacggtgggctatggcgacatggtccccaggagcaccccgggccaggtagtggccctgagcagcatcctgagcggcatcctgctcatggccttcccagtcacctccatcttccacaccttctcccgctcctacctggagctcaagcaggagcaagagagggtgatgttccggagggcgcagttcctcatcaaaaccaagtcgcagctgagcgtgtcccaggacagtgacatcttgttcggaagtgcctcctcggacaccagagacaataactgagcgcggaggacacgcctgccctgcctgccatctgtggcccgaagccattgccatccactgcagacgcctggagagggacaggccgcttccgagtgcagtcctggcgcagcaccgactcccacgcacccggggaaggacaccctcactcccacaccccgggaagaacactagaacatcagcagaggggccctgcccctccgcctgcagccgtgaaaggaagctgggtcatcagcccagccccgcccaccccagcccctatgtgtgtttccctcaataaggagatgccttgttcttttcaccatgcaaataacatgcccagcaaaaacttgctttatgggtctgcctggagaaaaaaaaaaaaaataccaccagcagaaacagcac

SEQ ID NO: 140 - DNA, 2260 bp, Homo sapiens
  misc_feature: Template ID: 337928.1
ggaagaaggaaaacgatttcaagagctgcacttaagcatctagaattttctgcgtcacacctcttgagagaagagactggctccaggtctgactcagtccactacaagctagacggtcttcttaaagcaccaacattacttgagtctttggataaaattgagaaaagagtctacaagtattgtggactctacaggaggcaggaggctgacaactggcagtaaagacaaagatgtcaggcctgcggcccggcactcaagtggaccctgagattgagctttttgtaaaggctggaagtgatggagagagtattggaaactgtcccttttgccaacgccttttcatgatcctctggcttaaaggagttaaatttaatgtgacaactgttgacatgaccagaaagcctgaagaactaaaggacttagccccaggtaccaatcctccgttcctggtgtataacaaggagttgaaaacagacttcattaaaattgaggagtttttagaacaaaccctggctcctccaaggtaccctcacctgagtcccaagtacaaggagtcttttgatgtgggctgtaacctctttgccaagttttctgcatacattaagaatacacaaaaggaggcaaataagaattttgaaaaatctctgctcaaagaattcaagcgtctggatgactacttaaacaccccacttctggatgaaattgatccagacagtgctgaggaacccccagtttccagaagactattcttggatggggaccagctaacactggctgattgtagcttgttacccaagctgaacattattaaagttgctgccaagaaatatcgtgactttgacattccagcagaattctcaggagtctggcgttatctccacaatgcctatgcccgtgaagaatttacccacacgtgtcctgaagacaaagaaattgaaaatacttacgcaaatgtggctaaacagaagagttaggagagctcttacaggagaaaaggctatatttgtgatcagattttacttattgacatattagaaaggtttttgcaaataagaatatgaaaaatactgtttcttctatccaactctcttatgaaaaggaactctgtattttctattagccataaataatctgtccactgtattttacaggtcttcatacttttacttaattttctttatctgtatggcaaaccactgcaatcctgaatgacatggaaagcatcacaatcttttgccctttgcttgaattcctggaatgcatacatataagctaaacagatgtctgcagttataaatgtcataagtagaggtacaatctcaccctgctccttagaaacatttccatataaatcgctaaaataatttcacatttttgttagtttaatatatacatgagtttatttctgatataaataataaatacagagagtgagcatatcagagaggcaaattcttaaagaatgatttttaaaatcagctctaggaagagctcaagatcaattggtcatagaacagcatttgacgcctagaactatgaccacctcatggtcagagatgagaatgtagcctttgtgaccagattatattatttttaaatgaagaagcactcattaaataaaacataattttaaaaaacaatataagaaacaaagtcaactgaatcttttattcatagaaatgaaaaggaaaataaaaactgtggctgaccaaaaggtcttcttgttgtccataaaaggataaggtaaacagtccttagataattacaaaactttctacaaaagttaaaatgttacattactatacgtattcagattcacttgttaaagtactcttaaatcattcaaatctggaaacaaaagctgaacttaactcttgctccctcaaaagagaaacacaagcataagtgcagcttcaaaaaaggaaaatattttaggctttggtggaagggtggagtttagataaaatttaaatgaagtagcgttttaataggttcaaagaaaagtaaggcaatgagcaaactcaaagtactgtccttgaaaaccatagagtcaagataaatgtatagtgtatggttaggtggcagagaaatgcaatcatgttgataatctttgagatacatcctgtcatcagtatatttcagaatacatgcaatgcactagcaagttacaattgatagaatacatttgaaatgttaaatgaaatagccggcacagaaagacaaacaccacatgtctcactcatatgtggatttaaaagtg

SEQ ID NO: 141 - DNA, 1623 bp, Homo sapiens
  misc_feature: Template ID: 430431.18
gggcggggccggtcggtgagtcagcggctctctgatccagcccgggagaggaccgagctggaggagctgggtgtggggtgccgttgggctggtggggaggcctagtttgggtgcaagtaggtctgattgagcttgtgttgtgctgaagggacagccctgggtctaggggagagagtccctgagtgtgagacccgccttccccggtcccagcccctcccagttcccccagggacggccacttcctggtccccgacgcaaccatggctgaagaacaaccgcaggtcgaattgttcgtgaaggctggcagtgatggggccaagattgggaactgcccattctcccagagactgttcatggtactgtggctcaagggagtcaccttcaatgttaccaccgttgacaccaaaaggcggaccgagagcagtgcagaagctgtgcccaggggggcagctcccattcctgctgtatggcactgaagtgcacacagacaccaacaagattgaggaatttctggaggcagtgctgtgccctcccaggtaccccaagctggcagctctgaaccctgagtccaacacagctgggctggacatatttgccaaattttctgcctacatcaagaattcaaacccagcactcaatgacaatctggagaagggactcctgaaagccctgaaggttttagacaattacttaacatcccccctcccagaagaagtggatgaaaccagtgctgaagatgaaggtgtctctcagaggaagtttttggatggcaacgagctcaccctggctgactgcaacctgttgccaaagttacacatagtacaggtggtgtgtaagaagtaccggggattcaccatccccgaggccttccggggagtgcatcggtacttgagcaatgcctacgcccgggaagaattcgcttccacctgtccagatgatgaggagatcgagctcgcctatgagcaagtggcaaaggccctcaaataagcccctcctgggactccctcaaccccctccattttctccacaaaggccctggtggtttccacattgctacccaatggacacactccaaaatggccagtgggcagggaatcctggagcacttgttccgggatggtgtggtggaagaggggatgagggaaagaaatggggggcctgggtcagatttttattgtggggtgggatgagtaggacaacatatttcagtaataaaatacagaataaaaatctgacccaggccccccatttctttccctcatcccctcttccaccacaccatcccggaacaagtgctccaggattccctcccactggccattttggagtgtgtccattgggtagcaatgtggaaaccaccagggcctttgtggagaaaatggagggggttgagggagtcccaggaggggcttatttgagggcctttgccactcactcactccactctgctcactccatcccccactcactcactccactctgtccactccatcccccactcactcgctccactctgtccactccatcccccactcactcactccactctgtccactccatcccccactcactcactccactctactcactccattctctcctcactctcatcaggcattgatg

SEQ ID NO: 142 - DNA, 4239 bp, Homo sapiens
  misc_feature: Template ID: 407376.3
  unsure 500-524: a, t, c, g, or other
gaattcagaagccactctcccgaaaccagagggatggggccggctgtgcagtagaacggggatcgaaaagaggaaaacaagggcacgaagaccagcgagaaagaagaggacacctgggaaaggcggaagcagaagacggggaagggaaaagaaacccatagcaggtggaaaccagatctagagcaacaccgtcaggttcacagtttgtttttctagaagagaagaaagtacctgaggattgctcttttttcctaccgttaatgaaaactacttttgtcttcatcataaaagaaaaaactaaggggaggtaaaggcagtctcctgttttattagggggagaggtgaagggaaatccaggctcactttctgaataagccactgcctggtgcacagagcagaaccatcctggtttctgaagacacatccctttcagcagaattccagccggagtcgctggcacagttctatttttatatttaaatgtatgtctcccctggccnnnnnnnnnnnnnnnnnnnnnnnnnagcaacacttttcttgtttgtaaacgcgagtgaccagaaagtgtgaatgcggagtaggaatatttttcgtgttctcttttatctgcttgccttttttagagagtagcagtggttcctatttcggaaaaggacgttctaattcaaagctctctcccaatatatttacacgaatacgcatttagaaagggaggcagcttttgaggttgcaatcctactgagaaggatggaagaaggagccaggcaccgaaacaacaccgaaaagaaacacccaggtgggggcgagtcggacgccagccccgaggctggttccggagggggcggagtagccctgaagaaagagatcggattggtcagtgcctgtggtatcatcgtagggaacatcatcggctctggaatctttgtctcgccaaagggagtgctggagaatgctggttctgtgggccttgctctcatcgtctggattgtgacgggcttcatcacagttgtgggagccctctgctatgctgaactcggggtcaccatccccaaatctggaggtgactactcctatgtcaaggacatcttcggaggactggctgggttcctgaggctgtggattgctgtgctggtgatctaccccaccaaccaggctgtcatcgccctcaccttctccaactacgtgctgcagccgctcttccccacctgcttccccccagagtctggccttcggctcctggctgccatctgcttattgctcctcacatgggtcaactgttccagtgtgcggtgggccacccgggttcaagacatcttcacagctgggaagctcctgggccttggccctgattatcatcatggggattgtacagatatgcaaaggagagtacttctggctggagccaaagaatgcatttgagaatttccaggaacctgacatcggcctcgtcgcactggctttccttcagggctcctttgcctatggaggctggaactttctgaattacgtgactgaggagcttgttgatccctacaagaaccttcccagagccatcttcatctccatcccactggtcacatttgtgtatgtctttgccaatgtcgcttatgtcactgcaatgtccccccaggagctgctggcatccaacgccgtcgctgtgacttttggagagaagctcctaggagtcatggcctggatcatgcccatttctgttgccctgtccacatttggaggagttaatgggtctctcttcacctcctctcggctgttcttcgctggagcccgagagggccaccttcccagtgtgttggccatgatccacgtgaagcgctgcaccccaatcccagccctgctcttcacatgcatctccaccctgctgatgctggtcaccagcgacatgtacacactcatcaactacgtgggcttcatcaactacctcttctatggggtcacggttgctggacagatagtccttcgctggaagaagcctgatatcccccgccccatcaagatcaacctgctgttccccaccatctacttgctgttctgggccttcctgctggtcttcagcctgtggtcagagccggtggtgtgtggcattggcctggccatcatgctgacaggagtgcctgtctatttcctgggtgtttactggcaacacaagcccaagtgtttcagtgacttcattgagctgctaaccctggtgagccagaagatgtgtgtggtcgtgtaccccgaggtggagcggggctcagggacagaggaggctaatgaggacatggaggagcagcagcagcccatgtaccaacccactcccacgaaggacaaggacgtggcggggcagccccagccctgaggaccaccattccctggctactctctccttcctcccccttttatcctacctccctgccttggtcccgccaacacatgcgagtacacacacacccctctctctgcttttgtcaggcagtggtaggactttggtgtgggtggtgagaaattgtaaacaaaaactgacattcatacccaaagaaccagcctctcaccccagggtccatgtcccaggccccactccagtgctgcccacactcccagctgctggaggagaggggagatgccaaggtgccctgcaggacctccctccgggccacaccctcagctgcctcttcaggaaccggagctcattactgccttccctcccagggaggccccttcagagaggagaggccacaggagctgcattgtggggggacaggctcaagcaattctgtccccatcaaggggtcagctggagagacccaagaccctatctgttcaccagggacccaaaatccaaggggatgcttccctctgccctctttcctgcccctccccatcatacctgcacccaccccagccagggctccctgtccagaattcggttctcctcaggacgccaactcccagagctaaggaccaaggagaagaacagcctctccacccccaagccaggcggttgaggaacatattgagaaaggttcagattgcagaaacccagccctgcccctgcctcctgcatccagcccccaacatggtgccaaagcttccagaagccaaaaagcttctgatttttaaggtagtgggcatctctctcctaatgacgaagctgctcagcaactccacctgcccgccgcaggaaggagcagtcccctgctatccctgcagccactcccagcacacccgcacacagccagcaccaccgcccccaccgtgcacttctcctctctgggccttggcttgggaccaggtacgaaggatccccaagcccttcaggcctgagatcagagccagatcagccttaagtcacctcccatccaagaacttggcctaaaaatactcccctatttctaaccctcaggacggatctgatattaaatgccttccctgggaggaagggtgctttccccctccctagaggtgcccattccataccctgggagactgaggagagcattggctgaagcccagttcctttcccatccatccccaactccaataatcccccactcctcgcaggtctcagtgtcatgctgtcttggggcagggtgaaagggtagtggcagcagggcgcccactctggagatcctcaaaaaaggccctcctctgtggctggcagcctctgacctttccctgggcttcaaaggaaggctatggagtttgctgtgggccctgcaaccttcccagccactcctgctgcactaaggacttaggatccttttatcacaaatcgggattctctcccccaccccgaattctgtctgcttaaactggaatacacaggagcccttcctggcctggatggtgtctcccagcttccccgcccagcttgcccaccccatagttggtgagatgccaagtttggtctgagttgtgaccccttcagagtagatgcccggcaggctggggttggcccctggagggtcaggggaccatcttcttattccctcttttctcattcctccaacttcctcccctccttcaattatttttttgtaaagttgatgccttactttttggataaatatttttgaagctggtatttctatttcttttggattttttttaatgtaaggttgttttgggggatggagttagaaccttaatgataatttctttcgtttggtgtaggttttagagatttgttttgtggagaggtttttttcttttgatgtaataaaatttaaaatggaaatgaaa

SEQ ID NO: 143 - DNA, 5180 bp, Homo sapiens
  misc_feature: Template ID: 439010.7
agcaggctcccgcctcgcaccgctgccccgcgagcagctcctcttctcccgaggcgcgcggggcgcccccgcgagccccgcggctgagaccccgcagcctggaggagggctgtccggggctttggatgctgctgctaggggtggtgggagcagccgtgggacgcgtggccgggagcgggggtgacagcctgggattccgggggcttctcttccttgtcctcctcctctcctctctattcccagtgtggccgtggctgacactaaagactttgtagccatcaacccgagtgcagtttcgatggaaaatgaaggttgcacgttttcaaaaaatacctaatggtgaaaatgagacaatgattcctgtattgacatcaaaaaaagcaagtgaattaccagtcagtgaagttgcaagcattctccaagctgatcttcagaatggtctaaacaaatgtgaagttagtcataggcgagcctttcatggctggaatgagtttgatattagtgaagatgagccactgtggaagaagtatatttctcagtttaaaaatccccttattatgctgcttctggcttctgcagtcatcagtgttttaatgcatcagtttgatgatgccgtcagtatcactgtggcaatacttatcgttgttacagttgcctttgttcaggaatatcgttcagaaaaatctcttgaagaattgagtaaacttgtgccaccagaatgccattgtgtgcgtgaaggaaaattggagcatacacttgcccgagacttggttccaggtgatacagtttgcctttctgttggggatagagttcctgctgacttacgcttgtttgaggctgtggatctttccattgatgagtccagcttgacaggtgagacaacgccttgttctaaggtgacagctcctcagccagctgcaactaatggagatcttgcatcgagaagtaacattgcctttatgggaacactggtcagatgtggcaaagcaaagggtgttgtcattggaacaggagaaaattctgaatttggggaggtttttaaaatgatgcaagcagaagaggcaccaaaaacccctctgcagaagagcatggacctcttaggaaaacaactttccttttactcctttggtataataggaatcatcatgttggttggctggttactgggaaaagatatcctggaaatgtttactattagtgtaagtttggctgtagcagcaattcctgaaggtctccccattgtggtcacagtgacgctagctcttggtgttatgagaatggtgaagaaaagggccattgtgaaaaagctgcctattgttgaaactctgggctgctgtaatgtgatttgttcagataaaactggaacactgacgaagaatgaaatgactgttactcacatatttacttcagatggtctgcatgctgaggttactggagttggctataatcaatttggggaagtgattgttgatggtgatgttgttcatggattctataacccagctgttagcagaattgttgaggcgggctgtgtgtgcaatgatgctgtaattagaaacaatactctaatggggaagccaacagaaggggccttaattgctcttgcaatgaagatgggtcttgatggacttcaacaagactacatcagaaaagctgaatacccttttagctctgagcaaaagtggatggctgttaagtgtgtacaccgaacacagcaggacagaccagagatttgttttatgaaaggtgcttacgaacaagtaattaagtactgtactacataccagagcaaagggcagaccttgacacttactcagcagcagagagatgtgtaccaacaagagaaggcacgcatgggctcagcgggactcagagttcttgctttggcttctggtcctgaactgggacagctgacatttcttggcttggtgggaatcattgatccacctagaactggtgtgaaagaagctgttacaacactcattgcctcaggagtatcaataaaaatgattactggagattcacaggagactgcagttgcaatcgccagtcgtctgggattgtattccaaaacttcccagtcagtctcaggagaagaaatagatgcaatggatgttcagcagctttcacaaatagtaccaaaggttgcagtattttacagagctagcccaaggcacaagatgaaaattattaagtcgctacagaagaacggttcagttgtagccatgacaggagatggagtaaatgatgcagttgctctgaaggctgcagacattggagttgcgatgggccagactggtacagatgtttgcaaagaggcagcagacatgatcctagtggatgatgattttcaaaccataatgtctgcaatcgaagagggtaaagggatttataataacattaaaaatttcgttagattccagctgagcacgagtatagcagcattaactttaatctcattggctacattaatgaactttcctaatcctctgcaatgccatgcagattttgtggatcaatattattatggatggacccccagctcagagccttggagtagaaccagtggataaagatgtcattcgtaaacctcctcgcaactggaaagacagcattttgactaaaaacttgatacttaaaatacttgtttcatcaataatcattgtttgtgggactttgtttgtcttctggcgtgagctacgagacaatgtgattacacctcgagacacaacaatgaccttcacatgctttgtgttttttgacatgttcaatgcactaagttccagatcccagaccaagtctgtgtttgagattggactctgcagtaatagaatgttttgctatgcagttcttggatccatcatgggacaattactagttatttactttcctccgcttcagaaggtttttcagactgagagcctaagcatactggatctgttgtttcttttgggtctcacctcatcagtgtgcatagtggcagaaattataaagaaggttgaaaggagcagggaaaagatccagaagcatgttagttcgacatcatcatcttttcttgaagtatgatgcatattgcattattttatttgcaaactaggaattgcagtctgaggatcatttagaagggcaagttcaagaggatatgaagatttgagaactttttaactattcattgactaaaaatgaacattaatgttaaagacttaagactttaacctgctggcagtcccaaatgaaattatgcaactttgatatcatattccttgatttaaattggcttttgtgattgagtgaaactttataaagcatatggtcagttatttaattaaaaaggcaaaacctgaaccaccttctgcacttaaagaagtctaacagtacaaatacactatctatcttagatagatatatttttttttatttttaaatattgtactatttatggtggtggggctttcttactaatacacaaataaatttaatcatttcaaaggcattctatttggtttagaagttgattcccaggagtgccatatttcagctactgtatttcctttttcttgtaatgtaagcagctcagataccatgtgctatcatttttgtatcaagttttttgcacaggatgtgaccactgtcagatcactgttcttttctttctttttgtgattgaaaagcctatactacaatttgaagtaaatttttgtttttcttagtaagtgtaaatggttgctttatttttattttaaaaaggtatgtctttggtttggcagaattcatgcagggctatcaagtggtgttctagggtaacagtgtccataattaacgcttagtcatagagtcaaaaacatttaagactgattgggttgaagtttataataaattatattaacatgtcttcctttttgaggtaaagatatatactttgtcaaatatcattttgtcatcctctaaatataaatccaaatacctcagctaagtaattctattttattatttttactgttatgtatgtttttaatcatatttcttaggaagtataggctactggacttagaataaaaagtccccaaacccaaacaaatggtttatgaaccagagtatatgtggaagattctttgctggtcttgctcctgtgtgcatctgaagcttctttggcctagattttagcacaaacctgagtatatctcttctactttcatcatgtgttctgtaccttctttttgtttcattgggcatgctagggaaataggtggattttgtgtgtaatgccatcagtttttatgaaagcttgatgaggtataggtcatttgttttgagtatgtgggccagaaatttaaaattagaaatttgtttttctgttgagtatataaacaaaaattggtcccaattctaacaggtttaatccttcttgaagccaataagttttatcttttataatctgtcaggatgaaccactccttagcttttatccaatattaaactgcaagtgttagcactgaaatattgtcattgatagggaaaatatctattctttgagtcattgttactgaggcagttgagtgtaaggagctggctgcagtttattctacttaaccctttaaggctgaattgtcaaatgtacattgttccatgtcgttagatggaacatggaagccattgtctaatcaactctatcattagtgacttgatgtctcataccttaattttgtaatgatttttattctctgttacaaagacttgaaatacgtattaaatgcacgttaatgttttgctttgcattttaggttcagattatgacttgattgaaataaatgtgcctatacattcatttgctttgtactataaaaataaaaatgatttcttaagttaatgacatcccagtggggactattagcattaaaattatccatatggatgctgaagatacagaaattaaaattatccatatggatgctggagaatgcatagtacacagaatctatgatttaaaaagaagttgaatgtacagtacagatccagattgcaattttccataatatattaatccaagttgacatggatgagttaaatgggctagtatctaaattttaaatttttaccctatttcctaatcctaggacttgctagagtccctaacaatactaacttacttgatgtttttccctgttagactaccttatgga

SEQ ID NO: 144 - DNA, 3133 bp, Homo sapiens
  misc_feature: Template ID: 245184.1
gcctggctctggccctgggccccgccgcgacctggcgggtcccgccaagtcgccctaccagctggtgctgcagcacagcaggctccggggccgccagcaacggccccaacgtgtgtgctgtgcagaaggttattggcactaataggaagtacttcaccaactgcaagcagtggtaccacaggaaaatctgtggcaaatcaacagtcatcagctacgagtgctgtcctggatatgaaaaggtccctggggagaagggctgtccagcagccctaccactctcaaacctttacgagaccctgggagtcgttggatccaccaccactcagctgtacacggaccgcacggagaagctgaggcctgagatggagccgcccggcagcttcaccatcttcgcccctagcaacgaggcctgggcctccttgccagctgtgagatgacctccgtctgcccgggggactcttatggggaactgccttacttccccgaggggtgggcatgatgaatgggagtctgcagtcatttcctactgtttcaggaagctttctccttaaccccttagaaaaggctgtggaacttgagctaaaatatgtcttaccaggttgcgtctaatgccccccgttccctactgggcagaaagacttgggtgcttcctgaggagggatccttggcagaagagaggcctgggctcacgagggctgagaacatgtttcccagagttgcaaggacccatctcttaaacacagagtctgcagcccctaactgacaccctgtccttcctcctaggaagtgctggactccctggtcagcaatgtcaacattgagctgctcaatgccctccgctaccatatggtggggcaggcgagtcctgactgatgagctgaaacacggcatgaccctcacctctatgtaccagaattccaacatccagatccaccactatcctaatgggattgtaactgtgaactgtgcccggctgctgaaagccgaccaccatgcaaccaacggggtggtgcacctcatcgataaggtcatctccaccatcaccaacaacatccagcagatcattgagatcgaggacacctttgagacccttcgggctgctgtggctgcatcagggctcaacacgatgcttgaaggtaacggccagtacacgcttttggccccgaccaatgaggccttcgagaagatccctagtgagactttgaaccgtatcctgggcgacccagaagccctgagagacctgctgaacaaccacatcttgaagtcagctatgtgtgctgaagccatcgttgcggggctgtctgtggagaccctggagggcacgacactggaggtgggctgcagcggggacatgctcactatcaacgggaaggcgatcatctccaataaagacatcctagccaccaacggggtgatccactacattgatgagctactcatcccagactcagccaagacactatttgaattggctgcagagtctgatgtgtccacagccattgaccttttcagacaagccggcctcggcaatcatctctctggaagtgagcggttgaccctcctggctcccctgaattctgtattcaaagatggaacccctccaattgatgcccatacagaagtgagcggttgaccctcctggctcccctgaattctgtattcaaagatggaacccctccaattgatgcccatacaaggaatttgcttcggaaccacataattaaagaccagctggcctctaagtatctgtaccatggacagaccctggaaactctgggcggcaaaaaactgagagtttttgtttatcgtaatagcctctgcattgagaacagctgcatcgcggcccacgacaagagggggaggtacgggaccctgttcacgatggaccgggtgctgacccccccaatggggactgtcatggatgtcctgaagggagacaatcgctttagcatgctggtagctgccatccagtctgcaggactgacggagaccctcaaccgggaaggagtctacacagtcttcgctcccacaaatgaagccttccgagccctgccaccaagagaacggagcagactcttgggagatgccaaggaacttgccaacatcctgaaataccacattggtgatgaaatcctggttagcggaggcatcggggccctggtgcggctaaagtctctccaaggtgacaagctggaagtcagcttgaaaaacaatgtggtgagtgtcaacaaggagcctgttgccgagcctgacatcatgggccacaaatggcgtggtccatgtcatcaccaatgttctgcagcctccagccaacagacctcaggaaagaggggatgaacttgcagactctgcgcttgagatcttcaaacaagcatcagcgttttccagggcttcccagaggtctgtgcgactagcccctgtctatcaaaagttattagagaggatgaagcattagcttgaagcactacaggaggaatgcaccacggcagctctccgccaatttctctcagatttccacagagactgtttgaatgttttcaaaaccaagtatcacactttaatgtacatgggccgcaccataatgagatgtgagccttgtgcatgtgggggaggagggagagagatgtactttttaaatcatgttccccctaaacatggctgttaacccactgcatgcagaaacttggatgtcactgcctgacattcacttccagagaggacctatcccaaatgtggaattgactgcctatgccaagtccctggaaaaggagcttcagtattgtggggctcataaaacatgaatcaagcaatccagcctcatgggaagtcctggcacagtttttgtaaagcccttgcacagctggagaaatggcatcattataagctatgagttgaaatgttctgtcaaatgtgtctcacatctacacgtggcttggaggcttttatggggccctgtccaggtagaaaagaaatggtatgtagagcttagatttccctattgtgacagagccatggtgtgtttgtaataataaaaccaaagaaacataaaagcctccaagcaacgtgtagatgtgagacacatttgacagaacatctcaactcatagcttataatgatgccatttctccagctg

SEQ ID NO: 145 - DNA, 1682 bp, Homo sapiens
  misc_feature: Template ID: 352406.29
aataggtaattggattgtaatcgcccgcctggcttccgcgcaccattgggggtgctgagtctttcagtgagcaatcagtactgtgtggtgggagagggtagagattcaatagcaaatcccaggtggagagccaagggggaggagcagcaggaggaggcagagcacagcatcgtcgggaccagactcgtctcaggccagttgcagccttctgcagccaaacgccgaccaaggaaaactcactaccatgagaattgcagtgatttgcttttgcctcctaggcatcacctgtgccataccagttaaacaggctgattctggaagttctgaggaaaagcagctttacaacaaatacccagatgctgtggccacatggctaaaccaatgacccatctcagaagcagaatctcctagccccacagacccttccaagtaagtccaacgaaagccatgaccacatggatgatatggatgatgaagatgatgacgaccatgtggacagccaggactccattgactcgaacgactctgatgatgtagatgacactgatgattctcaccagtctgatgagtctcaccattctgatgaatctgatgaactggtcactgattttcccacggacctgccagcaaccgaagttttcactccagttgtccccacagtagacacatatgatggccgaggtgatagtgtggtttatggactgaggtcaaaatctaagaagtttcgcagacctgacatccagtaccctgatgctacagacgaggacatcacctcacacatggaaagcgaggagttgaatggtgcatacaaggccatccccgttgcccaggacctgaacgcgccttctgattgggacagccgtgggaaggacagttatgaaacgagtcagctggatgaccagagtgctgaaacccacagccacaagcagtccagattatataagcggaaagccaatgatgagagcaatgagcattccgatgtgattgatagtcaggaactttccaaagtcagccgtgaattccacagccatgaatttcacagccatgaagatatgctggttgtagaccccaaaagtaaggaagaagataaacacctgaaatttcgtatttctcatgaattagatagtgcatcttctgaggtcaattaaaaggagaaaaaatacaatttctcactttgcatttagtcaaaagaaaaaatgctttatagcaaaatgaaagagaacatgaaatgcttctttctcagtttattggttgaatgtgtatctatttgagtctggaaataactgatgtgtttgataattagtttagtttgtggcttcatggaaactccctgtaaactaaaagcttcagggttatgtctatgttcattctatagaagaaatgcaaactatcactgtattttaatatttgttattctctcatgaatagaaatttatgtagaagcaaacaaaatacttttacccacttaaaaagagaatataacattttatgtcactataatcttttgttttttaagttagtgtatattttgttgtgattatctttttgtggtgtgaataaatcttttatcttgaatgtaataagaatttggtggtgtcaattgcttatttgttttcccacggttgtccagcaattaataaaacataaccttttttactgcctataaaaaaaaaaaaaagggc

SEQ ID NO: 146 - DNA, 1654 bp, Homo sapiens
  misc_feature: Template ID: 352406.28
agaaaacctcatgacacaatctctccgcctccctgtgttggtggaggatgtctgcagcagcatttaaattctgggagggcttggttgtcagcagcagcaggaggaggcagagcacagcatcgtcgggaccagactcgtctcaggccagttgcagccttctcagccaaacgccgaccaaggaaaactcactaccatgagaattgcagtgatttgcttttgcctcctaggcatcacctgtgccataccagttaaacaggctgattctggaagttctgaggaaaagcagctttacaacaaatacccagatgctgtggccacatggctaaaccctgacccatctcagaagcagaatctcctagccccacagaatgctgtgtcctctgaagaaaccaatgactttaaacaagagacccttccaagtaagtccaacgaaagccatgaccacatggatgatatggatgatgaagatgatgacgaccatgtggacagccaggactccattgactcgaacgactctgatgatgtagatgacactgatgattctcaccagtctgatgagtctcaccattctgatgaatctgatgaactggtcactgattttcccacggacctgccagcaaccgaagttttcactccagttgtccccacagtagacacatatgatggccgaggtgatagtgtggtttatggactgaggtcaaaatctaagaagtttcgcagacctgacatccagtaccctgatgctacagacgaggacatcacctcacacatggaaagcgaggagttgaatggtgcatacaaggccatccccgttgcccaggacctgaacgcgccttctgattgggacagccgtgggaaggacagttatgaaacgagtcagctggatgaccagagtgctgaaacccacagccacaagcagtccagattatataagcggaaagccaatgatgagagcaatgagcattccgatgtgattgatagtcaggaactttccaaagtcagccgtgaattccacagccatgaatttcacagccatgaagatatgctggttgtagaccccaaaagtaaggaagaagataaacacctgaaatttcgtatttctcatgaattagatagtgcatcttctgaggtcaattaaaaggagaaaaaatacaatttctcactttgcatttagtcaaaagaaaaaatgctttatagcaaaatgaaagagaacatgaaatgcttctttctcagtttattggttgaatgtgtatctatttgagtctggaaataactaatgtgtttgataattagtttagtttgtggcttcatggaaactccctgtaaactaaaagcttcagggttatgtctatgttcattctatagaagaaatgcaaactatcactgtattttaatatttgttattctctcatgaatagaaatttatgtagaagcaaacaaaatacttttacccacttaaaaagagaatataacattttatgtcactataatcttttgttttttaagttagtgtatattttgttgtgattatctttttgtggtgtgaataaatcttttatcttgaatgtaataagaatttggtggtgtcaattgcttatttgttttcccacggttgtccagcaattaataaaacataaccttttttactgcctat

SEQ ID NO: 147 - DNA, 793 bp, Homo sapiens
  misc_feature: Template ID: 992455.45
catttctattgaaaaagcaagcaagcagaatttggaattcatccaatccaaatgcggcatcttcaaacctccatgatgctgcttacatgtctcgatatttacttaaaaaatatttatgatacttaaaattcaaaaggaaacctgcaagacctatttttctcccaatacattcactgaatgcagatttaaatgagtgcatctcattttgattgtgccctttgtgtactttaaaatgactacaatatagtacatttgtatttttaactggtaccaaaattaagatgaatcctggactcaatcatggcttgtggtctggtcgccagcaacctgaatctcaaacctggagagtgccttcgagtgcgaggcgaggtggctcctgacgctaagagcttcgtgctgaacctgggcaaagacagcaacaacctgtgcctgcacttcaaccctcgcttcaacgcccacggcgacgccaacaccatcgtgtgcaacagcaaggacggcggggcctgggggaccgagcagcgggaggctgtctttcccttccagcctggaagtgttgcagaggtgtgcatcaccttcgaccaggccaacctgaccgtcaagctgccagatggatacgaattcaagttccccaaccgcctcaacctggaggccatcaactacatggcagctgacggtgacttcaagatcaaatgtgtggcctttgactgaaatcagccagcccatggcccccaataaaggcagctgcctctgctccctctgaaaaaaaaaaaaaaaggcacgctcgcgatctaga

SEQ ID NO: 148 - DNA, 3437 bp, Homo sapiens
  misc_feature: Template ID: 255957.1
ctgggagcaacctcagcttctagtatccagactccagcgccgccccgggcgcggaccccaaccccgacccagagcttctccagcggcggcgcagcgagcagggctccccgccttaacttcctccgcggggcccagccaccttcgggagtccgggttgcccacctgcaaactctccgccttctgcacctgccacccctgagccagcgcgggcgcccgagcgagtcatggccaacgcggggctgcagctgttgggcttcattctcgccttcctgggatggatcggcgccatcgtcagcactgccctgccccagtggaggatttactcctatgccggcgacaacatcgtgaccgcccaggccatgtacgaggggctgtggatgtcctgcgtgtcgcagagcaccgggcagatccagtgcaaagtctttgactccttgctgaatctgagcagcacattgcaagcaacccgtgccttgatggtggttggcatcctcctgggagtgatagcaatctttgtggccaccgttggcatgaagtgtatgaagtgcttggaagacgatgaggtgcagaagatgaggatggctgtcattgggggcgcgatatttcttcttgcaggtctggctattttagttgccacagcatggtatggcaatagaatcgttcaagaattctatgaccctatgaccccagtcaatgccaggtacgaatttggtcaggctctcttcactggctgggctgctgcttctctctgccttctgggaggtgccctactttgctgttcctgtccccgaaaaacaacctcttacccaacaccaaggccctatccaaaacctgcaccttccagcgggaaagactacgtgtgacacagaggcaaaaggagaaaatcatgttgaaacaaaccgaaaatggacattgagatactatcattaacattaggaccttagaattttgggtattgtaatctgaagtatggtattacaaaacaaacatacaaacaaaaaacccatgtgttaaaatactcagtgctaaacatggcttaatcttattttatcttctttcctcaatataggagggaagatttttccatttgtattactgcttcccattgagtaatcatactcaactgggggaaggggtgctccttaaatatatatagatatgtatatatacatgtttttctattaaaaatagacagtaaaatactattctcattatgttgatactagcatacttaaaatatctctaaaataggtaaatgtatttaattccatattgatgaagatgtttattggtatattttctttttcgtctatatatacatatgtaacagtcaaatatcatttactcttcttcattagctttgggtgcctttgccacaagacctagcctaatttaccaaggatgaattctttcaattcttcatgcgtgcccttttcatatacttattttattttttaccataatcttatagcacttgcatcgttattaagcccttatttgttttgtgtttcattggtctctatctcctgaatctaacacatttcatagcctacattttagtttctaaagccaagaagaatttattacaaatcagaactttggaggcaaatctttctgcatgaccaaagtgataaattcctgttgaccttcccacacaatccctgtactctgacccatagcactcttgtttgctttgaaaatatttgtccaattgagtagctgcatgctgttcccccaggtgttgtaacacaactttattgattgaatttttaagttacttattcatagttttatatccccctaaactacctttttgttccccattccttaattgtattgttttcccaagtgtaattatcatgcgttttatatcttcctaataaggtgtggtctgtttgtctgaacaaagtgctagactttctggagtgataatctggtgacaaatattctctctgtagctgtaagcaagtcacttaatctttctacctcttttttctatctgccaaattgagataatgatacttaaccagttagaagaggtagtgtgaatattaattagtttatattactctcattctttgaacatgaactatgcctatgtagtgtctttatttgctcagctggctgagacactgaagaagtcactgaacaaaacctacacacgtaccttcatgtgattcactgccttcctctctctaccagtctatttccactgaacaaaacctacacacataccttcatgtggttcagtgccttcctctctctaccagtctatttccactgaacaaaacctacgcacataccttcatgtggctcagtgccttcctctctctaccagtctatttccattctttcagctgtgtctgacatgtttgtgctctgttccattttaacaactgctcttacttttccagtctgtacagaatgctatttcacttgagcaagatgatgtaatggaaagggtgttggcactggtgtctggagacctggatttgagtcttggtgctatcaatcaccgtctgtgtttgagcaaggcatttggctgctgtaagcttattgcttcatctgtaagcggtggtttgtaattcctgatcttcccacctcacagtgatgttgtggggatccagtgagatagaatacatgtaagtgtggttttgtaatttaaaaagtgctatactaagggaaagaattgaggaattaactgcatacgttttggtgttgcttttcaaatgtttgaaaacaaaaaaaatgttaagaaatgggtttcttgccttaaccagtctctcaagtgatgagacagtgaagtaaaattgagtgcactaaacaaataagattctgaggaagtcttatcttctgcagtgagtatggcccgatgctttctgtggctaaacagatgtaatgggaagaaataaaagcctacgtgttggtaaatccaacagcaagggagatttttgaatcataataactcataaggtgctatctgttcagtgatgccctcagagctcttgctgttagctggcagctgacgctgctaggatagttagtttggaaatggtacttcataataaactacacaaggaaagtcagccactgtgtcttatgaggaattggacctaataaattttagtgtgccttccaaacctgagaatatatgcttttggaagttaaaatttaaatggcttttgccacatacatagatcttcatgatgtgtgagtgtaattccatgtggatatcagttaccaaacattacaaaaaaattttatggcccaaaatgaccaacgaaattgttacaatagaatttatccaattttgatctttttatattcttctaccacacctggaaacagaccaatagacattttggggttttataatgggaatttgtataaagcattactctttttcaataaattgttttttaatttaaaaaaaggaaaaa

SEQ ID NO: 149 - DNA, 6777 bp, Homo sapiens
  misc_feature: Template ID: 235164.25
gcggtaggcgagagcacgcggaggagcgtgcgcgggggccccgggagacggcggcggtggcggcgcgggcagagcaaggacgcggcggatcccactcgcacagcagcgcactcggtgccccgcgcagggttcgcgatgctgcccggtttggcactgctcctgctggccgcctggacggctcgggcgctggaggtacccactgatggtaatgctggcctgctggctgaaccccagattgccatgttctgtggcagactgaacatgcacatgaatgtccagaatgggaagtgggattcagatccatcagggaccaaaacctgcattgataccaaggaaggcatcctgcagtattgccaagaagtctaccctgaactgcagatcaccaatgtggtagaagccaaccaaccagtgaccatccagaactggtgcaagcggggccgcaagcagtgcaagacccatccccactttgtgattccctaccgctgcttagttggtgagtttgtaagtgatgcccttctcgttcctgacaagtgcaaattcttacaccaggagaggatggatgtttgcgaaactcatcttcactggcacaccgtcgccaaagagacatgcagtgagaagagtaccaacttgcatgactacggcatgttgctgccctgcggaattgacaagttccgaggggtagagtttgtgtgttgcccactggctgaagaaagtgacaatgtggattctgctgatgcggaggaggatgactcggatgtctggtggggcggagcagacacagactatgcagatgggagtgaagacaaagtagtagaagtagcagaggaggaagaagtggctgaggtggaagaagaagaagccgatgatgacgaggacgatgaggatggtgatgaggtagaggaagaggctgaggaaccctacgaagaagccacagagagaaccaccagcattgccaccaccaccaccaccaccacagagtctgtggaagaggtggttcgagaggtgtgctctgaacaagccgagacggggccgtgccgagcaatgatctcccgctggtactttgatgtgactgaagggaagtgtgccccattcttttacggcggatgtggcggcaaccggaacaactttgacacagaagagtactgcatggccgtgtgtggcagcgccattcctacaacagcagccagtacccctgatgccgttgacaagtatctcgagacacctggggatgagaatgaacatgcccatttccagaaagccaaagagaggcttgaggccaagcaccgagagagaatgtcccaggtcatgagagaatgggaagaggcagaacgtcaagcaaagaacttgcctaaagctgataagaaggcagttatccagcatttccaggagaaagtggaatctttggaacaggaagcagccaacgagagacagcagctggtggagacacacatggccagagtggaagccatgctcaatgaccgccgccgcctggccctggagaactacatcaccgctctgcaggctgttcctcctcggcctcgtcacgtgttcaatatgctaaagaagtatgtccgcgcagaacagaaggacagacagcacaccctaaagcatttcgagcatgtgcgcatggtggatcccaagaaagccgctcagatccggtcccaggttatgacacacctccgtgtgatttatgagcgcatgaatcagtctctctccctgctctacaacgtgcctgcagtggccgaggagattcaggatgaagttgatgagctgcttcagaaagagcaaaactattcagatgacgtcttggccaacatgattagtgaaccaaggatcagttacggaaacgatgctctcatgccatctttgaccgaaacgaaaaccaccgtggagctccttcccgtgaatggagagttcagcctggacgatctccagccgtggcattcttttggggctgactctgtgccagccaacacagaaaacgaagttgagcctgttgatgcccgccctgctgccgaccgaggactgaccactcgaccaggttctgggttgacaaatatcaagacggaggagatctctgaagtgaagatggatgcagaattccgacatgactcaggatatgaagttcatcatcaaaaattggtgttctttgcagaagatgtgggttcaaacaaaggtgcaatcattggactcatggtgggcggtgttgtcatagcgacagtgatcgtcatcaccttggtgatgctgaagaagaaacagtacacatccattcatcatggtgtggtggaggttgacgccgctgtcaccccagaggagcgccacctgtccaagatgcagcagaacggctacgaaaatccaacctacaagttctttgagcagatgcagaactagacccccgccacagcagcctctgaagttggacagcaaaaccattgcttcactacccatcggtgtccatttatagaataatgtgggaagaaacaaacccgttttatgatttactcattatcgccttttgacagctgtgctgtaacacaagtagatgcctgaacttgaattaatccacacatcagtaatgtattctatctctctttacattttggtctctatactacattattaatgggttttgtgtactgtaaagaatttagctgtatcaaactagtgcatgaatagattctctcctgattatttatcacatagccccttagccagttgtatattattcttgtggtttgtgacccaattaagtcctactttacatatgctttaagaatcgatgggggatgcttcatgtgaacgtgggagttcagctgcttctcttgcctaagtattcctttcctgatcactatgcattttaaagttaaacatttttaagtatttcagatgctttagagagattttttttccatgactgcattttactgtacagattgctgcttctgctatatttgtgatataggaattaagaggatacacacgtttgtttcttcgtgcctgttttatgtgcacacattaggcattgagacttcaagcttttctttttttgtccacgtatctttgggtctttgataaagaaaagaatccctgttcattgtaagcacttttacggggcgggtggggaggggtgctctgctggtcttcaattaccaagaattctccaaaacaattttctgcaggatgattgtacagaatcattgcttatgacatgatcgctttctacactgtattacataaataaattaaataaaataaccccgggcaagacttttctttgaaggatgactacagacattaaataatcgaagtaattttgggtggggagaagaggcagattcaattttctttaaccagtctgaagtttcatttatgatacaaaagaagatgaaaatggaagtggcaatataaggggatgaggaaggcatgcctggacaaacccttcttttaagatgtgtcttccattttcatcttcttttgtatcataaatgaaacttcagactggttaaagaaaattgaatctgcctcttctccccacccaaaattacttcgattatttaatgtctgtagtcatccttcaaagaaaagtcttgcccggggttattttatttaatttatttatgtaatacagtgtagaaagcgatcatgtcataagcaatgattctgtacaatcatcctgcagaaaattgttttggagaattcttggtaattgaagaccagcagagcacccctccccacccgccccgtaaaagtgcttacaatgaacagggattcttttctttatcaaagacccaaagatacgtggacaaaaaaagaaaagcttgaagtctcaatgcctaatgtgtgcacataaaacaggcacgaagaaacaaacgtgtgtatcctcttaattcctatatcacaaatatagcagaagcagcaatctgtacagtaaaatgcagtcatggaaaaaaaatctctctaaagcatctgaaatacttaaaaatgtttaactttaaaatgcatagtgatcaggaaaggaatacttaggcaagagaagcagctgaactcccacgttcacatgaagcatcccccatcgattcttaaagcatatgtaaagtaggacttaattgggtcacaaaccacaagaataatatacaactggctaaggggctatgtgataaataatcaggagagaatctattcatgcactagtttgatacagctaaattctttacagtacacaaaacccattaataatgtagtatagagaccaaaatgtaaagagagatagaatacattactgatgtgtggattaattcaagttcaggcatctacttgtgttacagcacagctgtcaaaaggcgataatgagtaaatcataaaacgggtttgtttcttcccacattattctataaatggacaccgatgggtagtgaagcaatggttttgctgtccaacttcagaggctgctgtggcgggggtctagttctgcatctgctcaaagaacttgtaggttggattttcgtagccgttctgctgcatcttggacaggtggcgctcctctggggtgacagcggcgtcaacctccaccacaccatgatgaatggatgtgtactgtttcttcttcagcatcaccaaggtgatgacgatcactgtcgctatgacaacaccgcccaccatgagtccaatgattgcacctttgtttgaacccacatcttctgcaaagaacaccaatttttgatgatgaacttcatatcctgagtcatgtcggaattctgcatccatcttcacttcagagatctcctccgtcttgatatttgtcaacccagaacctggtcgagtggtcagtcctcggtcggcagcagggcgggcatcaacaggctcaacttcgttttctgtgttggctggcacagagtcagccccaaaagaatgccacggctggagatcgtccaggctgaactctccattcacgggaaggagctccacggtggttttcgtttcggtcaaagatggcatgagagcatcgtttccgtaactgatccttggttcactaatcatgttggccaagacgtcatctgaatagttttgctctttctgaagcagctcatcaacttcatcctgaatctcctcggccactgcaggcacgttgtagagcagggagagagactgattcatgcgctcataaatcacacggaggtgtgtcataacctgggaccggatctgagcggctttcttgggatccaccatgcgcacatgctcgaaatgctttagggtgtgctgtctgtccttctgttctgcgcggacatacttctttagcatattgaacacgtgacgaggccgaggaggaacagcctgcagagcggtgatgtagttctccagggccaggcggcggcggtcattgagcatggcttccactctggccatgtgtgtctccaccagctgctgtctctcgttggctgcttcctgttccaaagattccactttctcctggaaatgctggataactgccttcttatcagctttaggcaagttctttgcttgacgttctgcctcttcccattctctcatgacctgggacattctctctcggtgcttggcctcaagcctctctttggctttctggaaatgggcatgttcattctcatccccaggtgtctcgagatacttgtcaacggcatcaggggtactggctgctgttgtaggaactcgaaccacctcttccacagactctgtggtggtgatgctggtggtggcaatgctggtggttctctctgtggcttcttcgtagggttcctcagcctcttcctctacctcatcaccatcctcatcgtcctcgtcatcatcggcttcttcttcttccacctcagccacttcttcctcctctgctacttctactactttgtcttcactcccatctgcatagtctgtgtctgctccgccccaccagacatccgagtcatcctcctccgcatcagcagaatccacattgtcactttcttcagccagtgggcaacacacaaactctacccctcggaacttgtcaattccgcagggcagcaacatgccgtagtcatgcaagttggtactcttctcactgcatgtctctttggcgacggtgtgccagtgaagatgagtttcgcaaacatccatcctctcctggtgtaagaatttgcacttgtcaggaacgagaagggcatcacttacaaactcaccaactaagcagcggtagggaatcacaaagtggggatgggtcttgcactgcttgcggccccgcttgcaccagttctggatggtcactggttggttggcttctaccacattggtgatctgcagttcagggtagacttcttggcaatactgcaggatgccttccttggtatcaatgcaggttttggtccctgatggatctgaatcccacttcccattctggacattcatgtgcatgttcagtctgccacagaacatggcaatctggggttcagccagcaggccagcattaccatcagtgggtacctccagcgcccgagccgtccaggcggccagcaggagcagtgccaaaccgggcagcatcgcgaccctgcgcgggggcaccgagtgcgctgctgtgcgaagtgggatccgccgcgtccttgctctgcccgcgccgccaccgccgccgtctcccggggcccccgcgcacgctcctccgcgtgctctcgcctaccgctgccgaggaaactgaccactcgaccaggttctgggttgacaaatatcaagacggaggagatctctgaagtgaagatggacttcatatcctcc

SEQ ID NO: 150 - DNA, 635 bp, Homo sapiens
  misc_feature: Template ID: 997363.3
ggtccccaggagtcctgaacatctggggacagcgggaaaacatgagtgactccaaggaaccaagggtgcagcagctgggcctcctggaagaagatccaacaaccagtggcatcagactttttccaagagactttcaattccagcagatacatggccacaagagctctacagggtgtcttggccatggcgccctggtgctgcaactcctctccttcatgctcttggctggggtcctggtggccatccttgtccaagtgtccaaggtccccagctccctaagtcaggaacaatccgagcaagacgcaatctaccagaacctgacccagcttaaagctgcagtgggtgagctctcagagaaatccaagctgcaggagatctaccaggagctgacccagctgaaggctgcagtgggtgagttgccagagaaatccaagctgcaggagatctaccaggagctgacccggctgaaggctgcagtgggtgagttgccagagaaatccaagctgcaggagatctaccaggagctgacccggctgaaggctgcagtgggtgagttgccagagaaatccaagctgcaggagatctaccaggagctgacccggctgaaggcttgcagtgggtgagttgccagagaa

SEQ ID NO: 151 - DNA, 251 bp, Homo sapiens
  misc_feature: Template ID: 997363.1
  unsure 198, 205, 212: a, t, c, g, or other
cagaaacagccaaatggaagacatgtataggacaaagaaagatgtgggggtggaagaggttgtatggagcctccatgccctctctggatgccattggttgactgggggaattaattccctggtgcttccagcctgcaagatgagctccttcaaccagcaagtccccagtcaaaagggtgcacggggtgtagcacaatngaggccnaggccancagggaaacaaccattcgtctctgaagcaggccgcgggc

SEQ ID NO: 152 - DNA, 2035 bp, Homo sapiens
  misc_feature: Template ID: 1327354.1
acgtgtcaccccgactcaacgtgagacgcaccgcccggactcaccatgcgtgaatgcatctcagtccacgtggggcaggcaggtgtccagatgggcaatgcctgctgggagctctattgcttggaacatgggattcagcctgatgggcagatgcccagtgacaagaccattggtggaggggacgactccttcaccaccttcttctgtgaaactggtgctggaaaacacgtaccccgggcagtttttgtggatctggagcctacggtcattgatgagatccgaaatggcccataccgacagctcttccacccagagcagctcatcactgggaaagaggatgctgccaacaactatgcccgtggtcactataccattggcaaggagatcattgacccagtgctggatcggatccgcaagctgtctgaccagtgcacaggacttcagggcttcctggtgttccacagctttggtgggggcactggctctggcttcacctcactcctgatggagcggctctctgttgactatggcaagaaatccaagctggaattctccatctacccagccccccaggtgtctacagccgtggtcgagccctacaactctatcctgaccacccacaccaccctggagcactcagactgtgccttcatggtggacaacgaagcaatctatgacatctgccgccgcaacctagacatcgagcgcccaacctacaccaacctcaatcgcctcattagccaaattgtctcctccatcacagcttctctgcgctttgacggggccctcaatgtggacctgacagagttccagaccaacctggtgccctaccctcgcatccacttccccctggccacctatgcaccagtcatctctgcagaaaaggcataccacgagcagctgtcggtggcagagatcaccaatgcctgctttgagcctgccaaccagatggtaaagtgtgatccccggcacggcaagtacatggcctgctgcctgctgtaccgtggagatgtggtgcccaaggatgtcaacgctgccattgccgccatcaagaccaagcgcagcattcagtttgtggactggtgccccacaggcttcaaggttggtatcaactaccagcctcccactgtggtgcctgggggtgacctggccaaggtgcagcgtgccgtgtgcatgctgagcaacacgaccgccatcgccgaggcctgggcccgcctggaccacaagttcgacctgatgtatgccaagagggcgtttgtgcactggtatgtgggtgagggcatggaggagggtgagttctccgaggcccgtgaggatatggctgccctggagaaggattatgaggaggtgggcatcgactcctatgaggacgaggatgagggagaagaataaagcagctgcctggagcctattcactatgtttattgcaaaatcctttcgaaataaacagtttccttgcacggtttcttgttccctctgagtgcttgagcttctgctgccttccccttcatgctgctgctgctctgtttgctgttcatgacccttatcccttccatcgctgaaggtgagacctgcaaaggggttcttgccaggcccaggaagcataaccccagggactttaaattgaagtcctagggttactcagtatagggaggaaatgaggaccaaaatccaggcacaaactgttgaaggatgagtcttcagctcctttccaagtaggagtataatccagtggtttctgtctttgaaagttagactgctaccctgttcttcctgctgcctctacatttaccaactctggaagcaaggcttggcccaggctcctctgtgcattatgagggtttgggagtggggctgggctggcccagagttcctgggcatggagccacgtcataagcttgggggatgggagggaacacaggcgatctcctagagttgtttgtgccactgcacctctgagcagctttgcatagcttcctgtcttgctgctttgctggagctggggctgtgccattaaaagtcaggtcatctcccc

SEQ ID NO: 153 - DNA, 3134 bp, Homo sapiens
  misc_feature: Template ID: 358853.44
gagggcgcccccaccccacccgcccaccctccccgcttctcgctaggtcccgattggctggcgcgctccgcggctgggatggcagtgggaggggaccctctttcctaacggggttataaaaacagcgccctcggcggggtccagtcctctgccactctcgctccgaggtccccgcgccagagacgcagccgcgctcccaccacccacacccaccgcgccctgcgttcgcctcttctccgggagccagtcccgcgccaccgccgccgcccaggccatcgccaccctccgcagccatgttccaccaggtccgtgtcctcgtcctcctaccgcaggatgttcggcggcccgggcaccgcgagccggccgagctccagccggagctacgtgactacgtccacccgcacctacagcctgggcagcgcgctgcgccccagcaccagccgcagcctctacgcctcgtccccgggcggcgtgtatgccacgcgctcctctgccgtgcgcctgcggagcagcgtgcccggggtgcggctcctgcaggactcggtggacttctcgctggccgacgccatcaacaccgagttcaagaacacccgcaccaacgagaaggtggagctgcaggagctgaatgaccgcttcgccaactacatcgacaaggtgcgcttcctggagcagcagaataagatcctgctggccgagctcgagcagctcaagggccaaggcaagtcgcgcctgggggacctctacgaggaggagatgcgggagctgcgccggcaggtggaccagctaaccaacgacaaagcccgcgtcgaggtggagcgcgacaacctggccgaggacatcatgcgcctccgggagaaattgcaggaggagatgcttcagagagaggaagccgaaaacaccctgcaatctttcagacaggatgttgacaatgcgtctctggcacgtcttgaccttgaacgcaaagtggaatctttgcaagaagagattgcctttttgaagaaactccacgaagaggaaatccaggagctgcaggctcagattcaggaacagcatgtccaaatcgatgtggatgtttccaagcctgacctcacggctgccctgcgtgacgtacgtcagcaatatgaaagtgtggctgccaagaacctgcaggaggcagaagaatggtacaaatccaagtttgctgacctctctgaggctgccaaccggaacaatgacgccctgcgccaggcaaagcaggagtccactgagtaccggagacaggtgcagtccctcacctgtgaagtggatgcccttaaaggaaccaatgagtccctggaacgccagatgcgtgaaatggaagagaactttgccgttgaagctgctaactaccaagacactattggccgcctgcaggatgagattcagaatatgaaggaggaaatggctcgtcaccttcgtgaataccaagacctgctcaatgttaagatggcccttgacattgagattgccacctacaggaagctgctggaaggcgaggagagcaggatttctctgcctcttccaaacttttcctccctgaacctgagggaaactaatctggattcactccctctggttgatacccactcaaaaaggacacttctgattaagacggttgaaactagagatggacaggttatcaacgaaacttctcagcatcacgatgaccttgaataaaaattgcacacactcagtgcagcaatatattaccagcaagaataaaaaagaaatccatatcttaaagaaacagctttcaagtgcctttctgcagtttttcaggagcgcaagatagatttggaataggaataagctctagttcttaacaaccgacactcctacaagatttagaaaaaagtttacaacataatctagtttacagaaaaatcttgtgctagaatactttttaaaaggtattttgaatactattaaaactgcttttttttttccagcaagtatccaaccaacttggttctgcttcaataaatctttggaaaaacaaagcagttttaatagtattcaaaataccttttaaaaagtattctagcacaagatttttctgtaaactagattatgttgtaaacttttttctaaatcttgtaggagtgtcggttgttaagaactagagcttattcctattccaaatctatcttgcgctcctgaaaaactgcagaaaggcacttgaaagctgtttctttaagatatggatttcttttttaccttgctggtaatatattgctgcactgagtgtgtgcaatttttattcaaggtcatcgtgatgctgagaagtttcgttgataacctgtccatctctagtttcaaccgtcttaatcagaagtgtcctttttgagtgggtatcaaccagagggagtgaatccagattagtttccctcaggttcagggaggaaaagtttggaagaggcagagaaatcctgctctcctcgccttccagctgctaactaccaagacactattggccgcctgcaggatgagattcagaatatgaaggaggaaatggctcgtcaccttcgtgaataccaagacctgctcaatgttaagatggcccttgacattgagattgccacctacaggaagctgctggaaggcgaggagagcaggatttctctgcctcttccaaacttttcctccctgaacctgagggaaactaatctgggattcactcccctctggttgatacccactcaaaaaggacacttctgattaagacggttgaaactagagatggacaggttatcaacgaaacttctcagcatcacgatgaccttgaataaaaattgcacacactcagtgcagcaatatattaccagcaagaataaaaaagaaattcatatcttaaagaaacagctttcaagtgcctttctgcagtttttcaggagcgcaagatagatttggaataggaataagctctagttcttaacaaccgacactcctacaagatttagaaaaaagtttacaacataatctagtttacagaaaaatcttgtgctagaatactttttaaaaggtattttgaataccattaaaactgcttttttttttccagcaagtatccaaccaacttgtttctgcttcaataaatctttggaaaaactcaaaaa

SEQ ID NO: 154 - DNA, 1371 bp, Homo sapiens
  misc_feature: Template ID: 243019.14
gaagtgagaagccgggtggggcaggctggaaggaagacgaacctacgaagcagagatctgaagacagcatgtacacagccattccccagagtggctctccattcccaggctcagtgcaggatccaggcctgcatgtgtggcgggtggagaagctgaagccggtgcctgtggcgcaagagaaccagggcgtcttcttctcgggggactcctacctagtgctgcacaatggcccagaagaggtttcccatctgcacctgtggataggccagcagtcatcccgggatgagcagggggcctgtgccgtgctggctgtgcacctcaacacgctgctgggagagcggcctgtgcagcaccgcgaggtgcagggcaatgagtctgacctcttcatgagctacttcccacggggcctcaagtaccaggaaggtggtgtggagtcagcatttcacaagacctccacaggagccccagctgccatcaagaaactctaccaggtgaaggggaagaagaacatccgtgccaccgagcgggcactgaactgggacagcttcaacactggggactgcttcatcctggacctgggccagaacatcttcgcctggtgtggtggaaagtccaacatcctggaacgcaacaaggcgagggacctggccctggccatccgggacagtgagcgacagggcaaggcccaggtggagattgtcactgatggggaggagcctgctgagatgatccaggtcctgggccccaagcctgctctgaaggagggcaaccctgaggaagacctcacagctgacaaggcaaatgcccaggccgcagctctgtataaggtctctgatgccactggacagatgaacctgaccaaggtggctgactccagcccatttgcccttgaactgctgatatctgatgactgctttgtgctggacaacgggctctgtggcaagatctatatctggaaggggcgaaaagcgaatgagaaggagcggcaggcagccctgcaggtggccgagggcttcatctcgcgcatgcagtacgccccgaacactcaggtggagattctgcctcagggccgtgagagtcccatcttcaagcaatttttcaaggactggaaatgagggtgggcgtcttcctgccccatgctcccctgccccccaccacctgcctgcttgcttctctggctgcctggtcagtgcagaggtgccccctgcagatgttcaataaaggagacaagtgctttcccagctcttttcctgcaccacctgccctgggctgattctcactgtcacccacctattcacctgggttcatccccatgctgggggtggagtagcacacagatgacaattggacagccttggaggggccagagct

SEQ ID NO: 155 - DNA, 1376 bp, Homo sapiens
  misc_feature: Template ID: 1000016.22
  unsure 1210-1267: a, t, c, g, or other
tcatgccaaagacacaccagccctcagtcactgggagaagaacctctcataccctcggtgctccagtccccagctgcacttcagccacacacaccatgtgtgaagaggagaccaccgcgctcgtgtgtgaacaatggctctggcctgtgcaaggcaggcttcgcaggagatgatgccccccgggctgtcttcccctccattgtgggccgccctcgccaccagggtgtgatggtgggaatgggccagaaagacagctatgtgggggatgaggctcagagcaagcgagggatcctaactctcaaataccccattgaacacggcatcatcaccaactgggatgacatggagaagccccacgaccatttctccaacctaggctgccaacatctctccctggactattgcaatggcttcctggctgatttcttggtctcttgccctcattcaccgaattaattctctacactgctgcaaaactgatctttctaaacacagatcagctcatgtcactcacctcctcagaaatcttcagtagctcttcattaaccaacagggggttcctaactccccgtcttggcattggaggacctttccctgcctgatccccgcgatcatcttttcctgaaatatttactcaggccagtgctcaccccttctttaaaatgctggtgctggctcaagagaggcaaacagccatctctctcattcttatcttccctgtcaaggacttcacataggtggactgatgctagactatgatgatgagtctccagtgaaagtttctaagtagaactctctcagggtttctagaagcatttttgtttaagaaaatattgtggggagagcgggatttttaaatggtggagctcatggtaaacaaaattatgtgtgcaaaatgttaatagagcctttctaatattcttgtgattaactctggtgacagttggctgagtgttcttgtttctgcaacgcctgtctttggaaatgtgatagggggcttattgagcagactgcaactggaaatgaggaatgttgacttgaagtctgtaattcacttatacttttctctaaatcctagactgagtcactcaatgtgagataagtactgcacataaaatgcaatggatttcacgttatacagtggagtgggtaagagcagagacattagaggcaatggcaggaaatccaggtgcaaatcccaccctataannnnnnnnnnnnnnnnnnnnnnnnnnnnnnnnnnnnnnnnnnnnnnnnnnnnnnnnnnttggagattgaattagctaaatgcttagtataatcccaaggcatggaacatacttatgtgctcaataagtgacacatatgattcatatatatgtaacagtatctaattt

SEQ ID NO: 156 - DNA, 1441 bp, Homo sapiens
  misc_feature: Template ID: 1000016.44
  unsure 1214: a, t, c, g, or other
gaaagatcagttttgcagcagtgtagagaattaattcggtgaatgagggcaagagaccaagaaatcagccaggaagccattgcaatagtccagggagagatgttggcagcctaggttggagaaatggtcgtggggctgaaaagaaaggaaagacagaagtgagaagcattttacagggagagttgacagagcacagtggcctatgaatacgagggtcatgacgatgggtgatcattaaagcaggctcattaaggggaagtctacagataccttctccatgtcatcccagttggtgatgatgccgtgttcaatggggtatttgagagttaggatccctcgcttgctctgagcctcatcccccacatagctgtctttctggcccattcccaccatcacaccctggtggcgagggcggcccacaatggaggggaagacagcccggggggcatcatctcctgcgaagcctgccttgcacaggccagagccattctcataccctcggtgctccagtccccagctcactcagccacatacaccatgtgtgaagaggagaccaccgcgctcgtgtgtgacaatggctctggcctgtgcaaggcaggcttcgcaggagatgatggccccccgggctgtcttcccctccattgtgggccgccctcgccaccagatctggcaccactccttctacaatgagctgcgtgtagcacctgaagagcaccccaccctgctcacagaggctcccctaaatcccaaggccaacagggagaagatgacccagatcatgtttgaaaccttcaatgtccctgccatgtacgtcgccattcaagctgtgctctccctctatgcctctggccgcacgacaggcatcgtcctggattcaggtgatggcgtcacccacaatgtccccatctatgaaggctatgccctgccccatgccatcatgcgcctggacttggctggccgtgacctcacggactacctcatgaagatcctcacagagagaggctattcctttgtgaccacagctgagagagaaattgtgcgagacatcaaggagaagctgtgctatgtggccctggattttgagaatgagatggccacagcagcttcctcttcctccctggagaagagctatgagctggccagatgggcaggttatcaccatgggcaatgagcgcttccgctgccctgagaccctcttccagccttcctttatnggcatggagtccgctggaattcatgagacaacctacaattccatcatgaagtgtgacattgacatccgtaaggacttatatgccaacaatgtcctctctgggggcaccaccatgtaccctggcattgctgacaggatgcagaaggagatcacagccctggcccccagcaccatgaagatcaaggtgggtcttgcctcagttgtctccatcctgttctttgtataaag

SEQ ID NO: 157 - DNA, 3413 bp, Homo sapiens
  misc_feature: Template ID: 1000084.41
  unsure 482, 551, 3336, 3382: a, t, c, g, or other
ctgaatctcttctgtcaggagctgactgaaaaaaaaacaaaaaacccttttggagcctacagttccgcaatgatgaaaggtttttttgtttttttttcagtcagctcctgacagaagaggttcagtgagggcgaaccccgcccagtggctccaacgccatagaagccagaaacaaacaaccccgcccctgcgccgccctgacacccgctgccgggggctccggcagaaactcaccatgttttcccgggaatgtgtgggtatctttccaaaacgccaaagaccgcggagggtcttcccacgctaccctaggctgcgcttgttcccgttccccctcccacgtcccccagctcgcccaacgcccccgctctttttgggtgcctcctcctctcccggtccccagagaacaacgcgagacagaaagtggcccctcagcatcagcgaaaccgtgcgcacagacacggggcccagccgggacgccccanacccctcggtcgcggcagacgggctgcccgcggcccccgaaagtctctcggataacacaggcgcctagncgccgcctttgttcctccccagcgctctgctgcgccctgggcgcagtactggcccggttcctgcacccgcactgcggcggcggcggggcttgaggatttggggctaagctaaacctcacaaaacataccaccaccctcgcccagagagcttacgaaagaaaagagcttaaaggttttccaagtagagcctgggggcgctgactccacccaacggccacaaagagccgaagccgattctcacgcatggttgcctgcttcgcggactgccgagctgatggcggagacgaagaggagaggttgttgcttcttacagcgcgactcttaggcggtcgatgtaagagaacctctcctcttcgtctccgccatcagctcggcagtcgcgaagcagcaaccatgcgtgagtgcatctccatccacgttggccaggctggtgtccagattggcaatgcctgctgggagctctactgcctggaacacggcatccagcccgatggccagatgccaagtgacaagaccattgggggaggagatgattccttcaacaccttcttcaggtcaaacttgtggtccaggcgagcccaggcctcagcaatggctgtggtgttgctcagcatgcacacagctctctgtaccttggccaggtctccaccaggcaccacagtgggaggctggtagttgatgccaaccttgaagccagtggggcaccaatccacaaactggaatctgcgcttggttttgatggtggcaatggcagcattgacatctttgggaaccacgtcaccacggtacaacaggcagcaagccatgtatttaccatggcgagggtcacatttcaccatctggttggctggctcaaagcaagcattggtgatctctgctacagaaagctgttcatggtaggctttctcagcagagatgacaggggcatatgtggccagagggaagtggatgcgggggtagggcaccaggttggtctggaattctgtcaggtcaacattcagggctccatcaaatctcagggaagcagtgatggaggacacaatctggctaataaggcggttaaggttagtgtaggttgggcgctcgatatcgaggtttctacgacagatgtcatagatggcctcattgtctaccatgaaggcacaatcagagtgctccagggtggtgtgggtggtgaggatggagttgtagggctcaactacagctgtggaaacctggggtgccgggtaaatggagaactccagcttggatttcttgccataatcaactgagagacgttccatgagcagggaggtgaacccagaaccagttcccccaccaaagctgtggaaaaccaagaagccctgaagaccggtgcactggtcagccagcttgcgaattcggtccaacacaaggtcaatgatctccttgccaatggtgtagtgccctcgggcatagttattggcagcatcttccttgcctgtgatgagctgctcagggtggaagagctggcggtaggtgccagtgcgaacttcatcaatgactgtgggttccaagtctacaaacacagcccggggcacgtgcttgccagcgcccgtctcactgaagaaggtgttgaaggagtcatctcctcccccaatggtcttgtcacttggcatctggccatcgggctggatgccgtgttccaggcagtagagctcccagcaggcattgcccaatctggacaccagcctggccaacgtggatggagatgcactcacgcatagctggctagggattaggaggcgaaggcgacaggagcagacaccgggtcccggttacttacctcgactcttagcttgtcggggacggtaaccgggacccggtgtctgctcctgtcgccttcgcctcctaatccctagccactatgcgtgagtgcatctccatccacgttggccaggctggtgtccagattggcaatgcctgctgggagctctactgcctggaacacggcatccagcccgatggccagatgccaagtgacaagaccattgggggaggagatgactccttcaacaccttcttcagtgagacgggcgctggcaagcacgtgccccgggctgtgtttgtagacttggaacccacagtcattgatgaagttcgcactggcacctaccgccagctcttccaccctgagcagctcatcacaggcaaggaagatgctgccaataactatgcccgagggcactacaccattggcaaggagatcattgaccttgtgttggaccgaattcgcaagctggctgaccagtgcaccggtcttcagggcttcttggttttccacagctttggtgggggaactggttctgggttcacctccctgctcatggaacgtctctcagttgattatggcaagaagtccaagctggctgaccagtgcaccggtcttcagggcttcttggttttccacagctttggtgggggaactggttctgggttcacctccctgctcatggaacgtctctcagttgattatggcaagaaatccaagctggagttctccatttacccggcaccccaggtttccacagctgtagttgagccctacaactccatcctcaccacccacaccaccctggagcactctgattgtgccttcatggtagacaatgaggccatctatgacatctgtcgtagaaacctcgatatggagacctggccaaggtacagagagctgtgtgcatgctgagcaacaccacagccattgctgaggcctgggctcgcctggaccacaagtttgacctgatgtatgccaaacgtgcctttnttcactggtacgttggggaggggatggaggaaggtgagtttttagnggcccgtgaggacatggctgccctttagaag

SEQ ID NO: 158 - DNA, 2336 bp, Homo sapiens
  misc_feature: Template ID: 481480.2
  unsure 2313: a, t, c, g, or other
cggcactgcagcaccagccgtctgcagctccggccgccacttgcgcctctccagcctccgcaggcccaaccgccgccagcaccatggccagcaccatttccgcctacaaggagaagatgaaggagctgtcggtgctgtcgctcatctgctcctgcttctacacacagccgcaccccaataccgtctaccagtacggggacatggaggtgaagcagctggacaagcgggcctcaggccagagcttcgaggtcatcctcaagtccccttctgacctgtccccagagagccctatgctctcctccccacccaagaagaaggacacctccctggaggagctgcaaaagcggctggaggcagccgaggagcggaggaagacgcaggaggcgcaggtgctgaagcagctggcggagcggcgcgagcacgagcgcgaggtgctgcacaaggcgctggaggagaataacaacttcagccgccaggcggaggagaagctcaactacaagatggagctcagcaaggagatccgcgaggcacacctggccgcactgcgcgagcggctgcgcgagaaggagctgcacgcggccgaggtgcgcaggaacaaggagcagcgagaagagatgtcgggctaagggcccgggacgggcggcgcccatcctgcgacggaacacgttcgggttttggttttgtttcgttcacctctgtctagatgcaacttttgttcctcctcccccaccccagcccccagcttcatgcttctcttccgcactcagccgccctgccctgtcctcgtggtgagtcgctgaccacggcttcccctgcaggagccgccgggcgtgagacgcggtccctcggtgcagacaccaggccgggcgcggctgggtcccccgggggccctgtgagagaggtggcggtgaccgtggtaaacccagggcggtggcgtgggatcgcgggtccttacgctgggctgtctggtcagcacgtgcaggtcatggcaggtcctctgagccggcgcccctggccagcaggcgaggctacagtacctgctgtctttccagggggaaggggctccccatgagggaggggcgacgggggaggggggtgatggtgcctgggagcctgcgtgtgcagccggtgcttgttgaactggcaggcgggtgggtgggggctgcagctttccttaatgtggttgcacaggggtcctctgagaccacctggcgtgaggtggacaccctgggccttcctggaagcctgcagttgggggcctgccctgagtctgctggggagtgggcattctctgccagggacccatgagcaggctgcatggtctagaggttgtgggcagcatggacagtcccccactcagaagtgcaagagttccaaagagcctctggcccaggcccctccgtgggacagccccgccgcccctccccaccagggctttgcagatgtccttgaaagacccaccctagagccctttggagtgctggcccctcctgtgccctctgccctggtggaagcggcagccacaagtcctcctcagggagccccaagggggattttgtgggaccgctgcccacagatccaggtgttggaagggcagcgggtaaggttcccaagccagccccaacacccttcccacttggcacccagagggggctgtgggtggaggcctgactccaggcctctcctgcccacaccctctgggctgagttccttctttcccttggacgcccagtgctggccttggaggacggtcagctggaggatggcggtgggggaggctgtctttgtaccactgcagcatcccccacttctccacggaagccccatcccaaagctgctgcctggccccttgctgtaaagtgtgaagggggcggctgagttctcttaggacccagagccagggccctcaacttccatcctgcgggaggccttggccggggcactgccagtgtcttccagagccacacccagggaccacgggaggatcctgacccctgcagggctcaggggtcagcagggacccactgccccatctccctctccccaccaagacagccccagaaggagcagccagctgggatgggaacccaaggctgtccacatctggcttttgtgggactcagaaagggaagcagaactgagggctgggatattcctcatggtggcagcgctcatagcgaaagcctactgtaatatgcacccatctcatccacgtagtaaagtgaacttaaaaattcaatcaaatgaacaattaaataaacacctgtgtgtttaagacatggttgaactgtctgtgtgtgtcctgcacctgtngggtcgggggcagctgcgggctc

SEQ ID NO: 159 - DNA, 5204 bp, Homo sapiens
  misc_feature: Template ID: 214181.1
agcgccgcctttgttccctgcaggaagggcgagcgcggcggccagcgctcagcgacccttcgtcctccgctaagctccaacgctctgctcgactagccgcgcgccttccggggctccgcagacccgcgagatggcaccaaggaggaacaacgggcagtgctggtgtctgctgatgctgctctcggtctccacgcccctccctgctgtcacccagacccgcggtgcgacagagactgcttcccagggtcacctggacctcacgcagctcatcggtgtcccgctgccctcgtccgtatcctttgtcacaggctatggtggcttcccggcctacagtttcgggcctggtgccaatgttggccgcccagccaggactctcatcccatccaccttcttcagggacttcgccatcagcgtcgtggtgaagcccagcagcacccgtggtggcgtgctcttcgccatcactgacgccttccagaaggtcatctacctgggcctgcggctctcaggtgtggaggacggccaccagcggatcatcctctactacacggagccaggctcccatgtgtcccaagaggctgctgccttctcggtgcctgtgatgacccacaggtggaaccgcttcgccatgattgtccagggtgaggaagtgaccctcctcgtgaactgtgaggagcacagccgcatccccttccagcggtcctcccaggctttggcttttgagtccagcgctggaatcttcatgggcaatgcaggagctacagggctcgagagattcactggctccctccagcagctcaccgtgcaccccgaccccaggactcccgaggagctgtgtgaccctgaagagtcctcggcatctggagagaccagtgggctgcaggaggcagacggagtagctgagatcttagaagccgtcacctacactcaagcctcgcccaaagaagcaaaagttgaacccataaacacacctccaactccatcctccccctttgaagacatggaactttctggtgaacctgtacccgaggggaccctggaaaccaccaacatgagcatcatccagcacagcagccccaaacaagggtctggtgagatcctgaatgacacactggagggggttcattctgtggatggtgaccccattactgacagcggctcaggggctggggccttccttgacattgctgaagaaaagaatttagcagcaacagcagcggggctggccgaggtgcccatcagcactgctggagaagcagaggccagcagtgtgcccaccgggggaccaaccctctctatgtccacggagaacccagaggaaggggtcactccaggtccagataatgaagagcgtttagcagcaacagcagcaggggaggccgaggcactcgccagcatgcctggggaagtggaggccagtggtgtggcccccggggagctggacctctccatgtccgcccagagcctcggggaagaggccactgtgggtccaagcagtgaagacagtttaacaacagctgcagctgcaaccgaagtgtccctcagtacttttgaggatgaggaagccagtggggtccccacagatggcctggctcccctcacagccaccatggcccctgagcgggcagtcacttctggtcctggtgatgaagaagacttggcagcagccacaacagaggagcccctcatcacagctgggggtgaagagtccggcagccctccccctgatgggccaccgctgcccctgcccacagtggctcctgaaagatggatcactccagctcaaagagaacatgtgggaatgaaaggacaggctgggcccaaaggagaaaagggtgatgctggggaggagcttcctggccctcctgaaccttctgggcctgttggacccacggcaggagcagaagcagagggctctggcctaggctggggctcggacgtcggctctggctctggtgacctggtgggcagtgagcagctgctgagaggtcctccaggacccccagggccacctggcttacctgggattccaggaaaaccaggaactgatgttttcatgggaccccctggatctcctggagaggatggacctgctggtgaacctgggcccccgggccctgagggacagcctggagttgatggagccaccggccttcccgggatgaaaggggagaagggagcaagagggcctaatggctcagttggtgaaaagggtgaccctggcaacagaggcttacctggacccccggggaaaaagggacaagctggccctcctggggtcatgggacccccagggcctcctggaccccctgggcccccaggccctggatgcacaatgggacttggattcgaggataccgaaggctctggaagcacccagctattgaatgaacccaaactctccagaccaacggctgcaattggtctcaaaggagagaaaggagaccggggacccaagggagaaagggggatggatggagccagtattgtgggaccccctgggccgagagggccacctgggcacatcaaggtcttgtctaattccttgatcaatatcacccatggattcatgaatttctcggacattcctgagctggtggggcctccggggccggacgggttgcctgggctgccaggatttccaggtcctagaggaccaaaaggtgacactggtttacctggctttccaggactaaaaggagaacagggcgagaagggagagccgggtgccatcctgacagaggacattcctctggaaaggctgatggggaaaaagggtgaacctggaatgcatggagccccaggaccaatggggcccaaaggaccaccaggacataaaggagaatttggccttcccgggcgacctggtcgcccaggactgaatggcctcaagggtaccaaaggagatccaggggtcattatgcagggcccacctggcttacctggccctccaggcccccctgggccacctggagctgtgattaacatcaaaggagccattttcccaatacccgtccgaccacactgcaaaatgccagttgatactgctcatcctgggagtccagagctcatcacttttcacggtgttaaaggagagaaaggatcctggggtcttcctggctcaaagggagaaaaaggcgaccagggagcccagggaccaccaggtcctccacttgatctagcttacctgagacactttctgaacaacttgaagggggagaatggagacaaggggttcaaaggtgaaaaaggagaaaaaggagacattaatggcagcttccttatgtctgggcctccaggcctgcccggaaatccaggcccggctggccaaaaaggggagacagtcgttgggccccaaggacccccaggtgctcctggtctgcctgggccacctggctttggaagacctggtgatcctgggccaccggggcccccggggccaccaggacctccagctatcctgggagcagctgtggcccttccaggtccccctggccctccaggacagccagggcttcccggatccagaaacctggtcacagcattcagcaacatggatgacatgctgcagaaagcgcatttggttatagaaggaacattcatctacctgagggacagcactgagtttttcattcgtgttagagatggctggaaaaaattacagctgggagaactgatccccattcctgccgacagccctccaccccctgcgctttccagcaacccacatcagcttctgcctccaccaaaccctatttcaagtgccaattatgagaagcctgctctgcatttggctgctctgaacatgccattttctggggacattcgagctgattttcagtgcttcaagcaggccagagctgcaggactgttgtccacctaccgagcattcttatcttcccatttgcaagatctgtccaccattgtgaggaaagcagagagatacagccttcccatagtgaacctcaagggccaagtactttttaataattgggactcaattttttctggccacggaggtcagttcaatatgcatattccaatatactcctttgatggtcgagacataatgacagatccttcttggccccagaaagtcatttggcatggctccagcccccatggcgtccgccttgtggataactactgtgaagcatggcgaaccgcggacacagcggtcacgggacttgcctccccgctgagcacggggaagattctggaccagaaagcatacagctgtgctaatcggctaattgtcctatgtatcgaaaacagtttcatgacagacgctaggaagtaatggccttctgatgattcttaaagagttttcaattttttcttatgtgaagagttgacactgaaatctaaaatgtttaattgttgtaaatattacaggttttttttttttttactacatattctttacaacagcaaccaaagaaaacatacctcaatacactcaaaactgaagacatagaggactcagatcaaagacaaaatctgatccatatattggtgctagattctgcaggaaaccccagcagtgtgaacgcatcccaacataggttaagagcaagttgaaaacaaaggccatggcattctgccactgcatccttcagacagttatatcctccttttaaaccattgttgttgagtgtaagatgtccttcatgttttcttataaagtcagtgtttagaaatgttaccctttctaagttatatacagatcaaatgcttttttctttcacgtacatccatcatttgcaactgctgttcgtacacagaaacaggactgctcaaatgatcctatttgtattttctgatgctatcagactctaatgtttttttccctaaaatattattgccatcatgctttaggaattttatatttttacacaatcatattttagtatggtgtctgtttatgtaactctgacttgctggaaaagttgaaactccaaataatctgaaactagaaaagaaatagcacataattactaccttccccttggcggctctcctccccaacccccaccccacaattttatgacttccatttggcaattgttgaattataactgcgactgaaacaaacaggttcatagagatgaattttctgagaaacatatatctacatgttgtataattggattttttttccatgtaagtgaacataaaaacatcttttccgggtgctttcttcattt

SEQ ID NO: 160 - DNA, 1120 bp, Homo sapiens
  misc_feature: Template ID: 977305.3
  unsure 133: a, t, c, g, or other
ccggcctcagcagccccgccgctcggcgaacacgcagaccccgccggcccgggcgcgaacactcagcgcacccccgttccacttggtcccgccgcgccttccggtgcgccttccggtgcgccttccgctccgncccttcaggcaggaagtgtcggcgccgccactgtccggccacagcctaacgctcttcgctgtcgtttgtggtctcgcgcagggcggccccggttctggtgtttggcgtcggaattaaacaaccaccatgtcgagcaaaaaggcaaagaccaagaccaccaagaagcgccctcagcgtgcaacatccaatgtgtttgccatgtttgaccagtcacagattcaggagttcaaagaggccttcaacatgattgatcagaacagagatggcttcatcgacaaggaagatttgcatgatatgcttgcttctctagggaagaatcccactgatgcataccttgatgccatgatgaatgaggccccagggcccatcaatttcaccatgttcctgaccatgtttggtgagaagttaaatggcacagatcctgaagatgtcatcagaaacgcctttgcttgctttgatgaagaagcaacaggcaccattcaggaagattacctaagagagctgctgacaaccatgggggatcggtttacagatgaggaagtggatgagctgtacagagaagcacctattgacaaaaaggggaatttcaattacatcgagttcacacgcatcctgaaacatggagccaaagacaaagatgactgaaagaactttagctaaaatcttccagttacattgtcttactctcttttacttctcagacacttcccccaccctcatagaacctgttgcatgcaacttagtttcacagctttgcctcttctttttgatgtatttattccagacctttctgccacttagcacttgtataatcagactggaaatggggatgagggtgtaaattgtattgaaaaagatcgcgaataaaaatcaacaaatgtgaaagcccagaaaaatatattcgtatttctggttttgctggatttttacatttttatataataaaaatgttattttgaaataaagattatgctgactccaaaaaaa

SEQ ID NO: 161 - DNA, 469 bp, Homo sapiens
  misc_feature: Template ID: 450223.3
aatggggcttttaataacaggcgccctcggtgaggtcgcagctccttggcttgtagactccaggatgggacttggtgggtgtggcaggcccctctttgaagagtcacggcagatagccctcagtccttgctgcatcccgactccttgcctgcaaaagctctagacagagcacagtcctcagccgccccacacagcccgagttctggagccaggcctcgggggaggccagctccagccccctcttccccctcccccacaccttttcctcctccagtgacacaactggagcaagtttccaggaggagagaagaattccagtgaagcagcagctgcacgtccgaggcttggggaggacccaggactgtgtgggtttcttacctgcctgagccacctcagggaatcttccagcctaatgcaggcatttctgcacctttggggtcatgctttgtagcagtgtctcccttgcgac

SEQ ID NO: 162 - DNA, 684 bp, Homo sapiens
  misc_feature: Template ID: 375072.25
ctactgagcatgtccctctccagcagggtctggcttgggtggagccagtcttgctcgttaagcttttggacgctggatttccatcagctttccacagttttccaatgacaggaaatagcagacagcgggcttgatgtgcttaaaagctgccataagctgtggccatgactactgaagtaggctctgtgtctgaagtgaagaaggactctagccagttaggaacagatgcaaccaaggaaaaacctaaagaagtagcagaaaatcagcagaatcagtcttccgatccagaggaggaaaaaggttcccagccacctcctgcagctgaaagccaaagtagtctacgccgccagaagagagagaaggaaacatcggagagcaggggtatttctcggttcataccgccatggcttaagaagcaaaagtcatataccttagtagtggccaaagatggaggagataaaaaagagcctacccaagctgttgttgaagaacaggtcttagataaagaggaaccccttccagaagaacagagacaggctaagggtgatgctgaagaaatggctcagaagaaacaagagattaaagtcgaagtcaaggaagaaaaaccctcagtgagcaaggaagaaaaacacctcagtgagcaaagtggagatgcagactactgaattagtacgtaaggagaga

SEQ ID NO: 163 - DNA, 5646 bp, Homo sapiens
  misc_feature: Template ID: 1039889.12
  unsure 4006, 4202, 4479: a, t, c, g, or other
tctcaagttgggggacaaaaaagggggaagggggggcacgaaggctcatcattcaaaataaaacaaaataaaaaagtattaaggcgaagattaaaaaaattttgcattacataatttacaggaagtcccttgccatcctaaaagccaccccacttctctctaaggagaatggcccagtcctctcccaagtccacacaggggaggtgatagcattgctttcgtgtaaattttgcattacataatttacacgaaagcaatgctatcacctcccctgtgtggacttgggagaggtgatagcattgctttcgtgtaaattatgtaatgcaaatttttttaatcttcgccttaatacttttttattttgttttattttgaatgatgagccttcgtgcccccccttcccccttttttgtcccccaacttgagatgtatgaaggcttttggtctcaagtcagtgtacaggtaagccctggctgcctccacccactcccagggagaccaaaagccttcatacatctcaagttgggggacaaaaaagggggaagggggggcacgaaggctcatcattcaaaataaaacaaaataaaaaagtattaaggcgaagattaaaaaaattttgcattacataatttacacgaaagcaatgctatcacctcccctgtgtggacttgggagaggactgggccattctccttagagagaagtggggtggcttttaggatggcaagggacttcctgtaacaacgcatctcatatttggaatgactattaaaaaaaacaacaatgtgcaatcaaagtcctcggccacattgtgaactttgggggatgctcgctccaaccgactgctgtcaccttcaccgttccagtttttaaatcctgagtcaagccaaaaaaaaaaaaaaaaccaaaacaaaacaaaaaaaacaaataaagccatgccaatctcatcttgttttctgcgcaagttaggttttgtcaagaaagggtgtaacgcaactaagtcatagtccgcctagaagcatttgcggtggacgatggaggggccggactcgtcatactcctgcttgctgatccacatctgctggaaggtggacagcgaggccaggatggagccgccgatccacacggagtacttgcgctcaggaggagcaatgatcttgatcttcattgtgctgggtgccagggcagtgatctccttctgcatcctgtcggcaatgccagggtacatggtggtgccgccagacagcactgtgttggcgtacaggtctttgcggatgtccacgtcacacttcatgatggagttgaaggtagtttcgtggatgccacaggactccatgcccaggaaggaaggctggaagagtgcctcagggcagcggaaccgctcattgccaatggtgatgacctggccgtcaggcagctcgtagctcttctccagggaggagctggaagcagccgtggccatctcttgctcgaagtccagggcgacgtagcacagcttctccttaatgtcacgcacgatttcccgctcggccgtggtggtgaagctgtagccgcgctcggtgaggatcttcatgaggtagtcagtcaggtcccggccagccaggtccagacgcaggatggcatgggggagggcatacccctcgtagatgggcacagtgtgggtgaccccgtcaccggagtccatcacgatgccagtggtacggccagaggcgtacagggatagcacagcctggatagcaacgtacatggctggggtgttgaaggtctcaaacatgatctgggtcatcttctcgcggttggccttggggttcaggggggcctcggtcagcagcacggggtgctcctcgggagccacacgcagctcattgtagaaggtgtggtgccagattttctccatgtcgtcccagttggtgacgatgccgtgctcgatggggtacttcagggtgaggatgcctctcttgctctgggcctcgtcgcccacataggaatccttctgacccatgcccaccatcacgcccctggtgcctggggcgccccacgatgccccccgggccgtcttcccctccatcgtggggcgccccaggcaccagggcgtgatggtgggcatgggtcagaaggattcctatgtggggcgacgaggcccagagcaagagaggcatcctcaccctgaagtaccccatcgagcacgggcatcgtcaccaactgggacgacatggagaaaatctggcaccacaccttctacaatgagctgcgtgtggctcccgaggagcaccccgtgctgctgaccgaggcccccctgaaccccaaggccaaccgcgagaagatgacccagatcatgtttgagaccttcaacaccccagccatgtacgttgctatccaggctgtgctatccctgtacgcctctggccgttaccactggcatcgtgatggactccggtgacggggtcacccacactgtgcccatctacgaggggtatgccctcccccatggccatcctggcgtctggacctggctggccgggacctgactgactacctcatgaagatcctcaccgagcgcggctacagcttcaccaccacgggccgagcgggaaatcgtgcgtgacattaaggagaagctgtgctacgtcgccctggacttcgagcaagagatggccacggctgcttccagctcctccctggagaagagctacgagctgcctgacggccaggtcatcaccattggcaatgagcggttccgctgccctgaggcactcttccagccttccttcctgggcatggagtcctgtggcatccacgaaactaccttcaactccatcatgaagtgtgacgtggacatccgcaaagacctgtacgccaacacagtgctgtctggcggcaccaccatgtaccctggcattgccgacaggatgcagaaggagatcactgccctggcacccagcacaatgaagatcaagatcattgctcctcctgagcgcaagtactccgtgtggatcggcggctccatcctggcctcgctgtccaccttccagcagatgtggatcagcaagcaggagtatgacgagtccggcccctccatcgtccaccgcaaatgcttctaggcggactatgacttagttgcgttacaccctttcttgacaaaacctaacttgcgcagaaaacaagatgagattggcatggctttatttgttttttttgttttgttttggtttttttttttttttggcttgactcaggatttaaaaactggaacggtgaaggtgacagcagtcggttggagcgagcatcccccaaagttcacaatgtggccgaggactttgattgcacattgttgtttttttaatagtcattccaaatatgagatgcgttgttacaggaagtcccttgccatcctaaaagccaccccacttctctctaaggagaatggcccagtcctctcccaagtccacacaggggaggtgatagcattgctttcgtgtaaattatgtaatgcaaaatttttttaatcttcgccttaatacttttttattttgttttattttgaatgatgagccttcgtgcccccccttcccccttttttgtcccccaacttgagatgtatgaaggcttttggtctccctgggagtgggtggaggcagccagggcttacctgtacactgacttgagaccagttgaataaaagtgcacaccttaaaaaagtattaaggcgaagattaaaaaaattttgcattacataatttacacgaaagcaatgctatcacctcccctgtgtggacttgggagaggactgggccattctccttagagagaagtggggtggcttttaggatggcaagggacttcctgtaacaacgcatctcatatttggaatgactattaaaaaaacaacaatgtgcaatcaaagtcctcggccacattgtgaactttgggggatgctcgctccaaccgactgctgtcaccttcaccgttccagtttttaaatcctgagtcaagccaaaaaaaaaanaaaagccaaaacaaaacaaaaaaaacaaataaagccatgccaatctcatcttgttttctgcgcaagttaggttttgtcaagaaagggtgtaacgcaactaagtcatagtccgcctagaagcatttgcgggggacgatggaggggccggactcgtcatactcctgcttgctgatccacatctgctggaaggtggagnaatgatcttgatcttcattgtgctgggtgccagggcagtgatctccttctgcatcctgtcgggcaatgccagggtacatggtggtgccgccagacagcactgtgttggcgtacaggtctttgcggatgtccacgtcacacttcatgatggagttgaaggtagtttcgtggatgccacaggactccatgcccaggaaggaaggctggaagagtgcctcagggcagcggaaccgctcattgccaatggtgatgacctggccgtcaggctgcttccagcncctccctggagaagagctacgagctgcctgacggcaggtcatcaccattggcaatgagcggttccgctgcctgaggcactcttccagccttccttcctgggcatggagtcctgtggcatccacgaaactaccttcaactccatcatgaagtgtgacgtggacatccgcaaagacctgtacgccaacacagtgctgtctggcggcaccaccatgtaccctggcattgccgacaggatgcagaaggagatcactgccctggcacccagcacaatgaagatcaaggtgggtgtctttcctgcctgagctgacctgggcaggtcggctgtggggtcctgtggtgtgtggggagctgtcacatccagggtcctcactgcctgtccccttccctcctcagatcattgctcctcctgagcgcaagtactccgtgtggatcggcggctccatcctggcctcgctgttccaccttccagcagatgtggatcagcaagcaggagtatgacgagtccggcccctccatcgtccaccgcaaatgcttctaggcggactatgacttagttgcgttacaccctttcttgacaaaacctaacttgcgcagaaaacaagatgagattggcatggctttatttgttttttttgttttgttttggtttttttttttttttggcttgactcaggatttaaaaactggaacggtgaaggtgacagcagtcggttggagcgagcatccccccaagttcacaatgtggccgaggactttgattgcacattgttgtttttttaatagtcattccaaatatgagatgcgttgttacaggaagtcccttgccatcctaaaagccaccccacttctctctaaggagaatggcccagtcctctcccaagtccacacaggggaggtgatagcattgctttcgtgtaaattatgtaatgcaaaatttttttaatcttcgccttaatacttttttattttgttttattttgaatgatgagccttcgtgcccccccttcccccttttttgtcccccaacttgagatgtatgaaggcttttggtctccctgggagtgggtggaggcagccagggcttacctgtacactgacttgagaccagttgaataaaagtgcacaccttaaaaaaaaaaaaaaagcggccgatcgcgatctagaac

SEQ ID NO: 164 - DNA, 3004 bp, Homo sapiens
  misc_feature: Template ID: 245367.2
  unsure 2921, 2975: a, t, c, g, or other
gcagaagcggcggcggcgggcggcgggagccgaggaggaggttccggacgctgcttaggaaccggggactcaggagtgcccgcgccctgagcgctcagctccagaggcgtcatggctgagtacgggaccctcctgcaagacctgaccaacaacatcacccttgaagatctagaacagctcaagtcggcctgcaaggaagacatccccagcgaaaagagtgaggagatcactactggcagtgcctggtttagcttcctggagagccacaacaagctggacaaagacaacctctcctacattgagcacatctttgagatctcccgccgtcctgacctactcactatggtggttgactacagaacccgtgtgctgaagatctctgaggaggatgagctggacaccaagctaacccgtatccccagtgccaagaagtacaaagacattatccggcagccctctgaggaagagatcatcaaattggctcccccaccgaagaaggcctgagcaagggggaggaagaggaggaaggttggaccttcatcagaccactcccttcccccatcctccaggagagggggcaagggcaacccaccatctacccacttactaacctggtcctaacccccttactgtgcgcgtgtgtgtgcgtgtgcgcacgctctggctgtttgtctatatgtctagctcatctagttcctcttcttaaggggatgggggtcaggggctaggggagggggctgagtttccccactttaggaggaggtgggggctatttctatgcaaatagaaatcagcacattcctcctacttccctttcctccactccccccatatctttaaagtgtggaagcagaaaggacctgcattttcctacattgaggagctgacataggggtaaggtatgggagaggtaggtggatccagggaaaagcagtggggacggaaggcaaagagaccactcaacccccacctggaaggggcaaagaaaagccagagttccatgtttgtactcctgtgctggactgtttcctgagtaccagcaggtccctttttgtctctcatgggcctagcataggtatgagccagggatcctttcctggtccctaagatcaaaccccatggagcagccagcgttagatgcccccacccacctgtactctggagagactgtgctgggaacatgtaccactgagcctgagatggggatgagggcagagagaggggagccccctcttccactcagttgttcctactcagactgttgcactctaaacctagggaggttgaagaatgagacccttaggttttaacacgaatcctgacaccaccatctatagggtcccaacttggttattgtaggcaaccttccctctctccttggtgaagaacatcccaagccagaaagaagttaactacagtgttttcctttgcaccgatccccaccccaattcaatcccggaagggacttacttaggaaacccttctttactagatatcctggccccctgggcttgtgaacacctcctagccacatcactacagtacagtgagtgaccccagcctcctgcctaccccaagatgcccctccccaccctgaccgtgctaactgtgtgtacatatatattctacatatatgtatattaaaactgcactgccatgtctgcccttttttgtggtgtctagcattaacttattgtctaggccagagcgggggtgggaggggaatgccacagtgaagggagtggcagaatcaaattgctacatagtccaaacaaaaaagaaggctttttcaaaaaacattaaattcacatgcagtctcagagactatttagacaaagttcaagttaggagcttttaggatgtgggagtaaaactttaatgggaggggagggctggctgctggaagaaggaagaagccagactggttagacagtactcttaactcctagcccagcctagcgtgccctgcccctctggccactgctgcagacacctgccttaacacacacacctctaggactccacagttttgccttaaaggaccttcccaagtctccctttccctgtctggcttctcccttaagaagagagagatacttgtagaattgggtggggggaatgagcatgaactgtccttccatttgggatatgttacattagagtgagagagagaataaggagcctttcttatggaagaaatgggagaagagagacagggttcttttcagcagagtctagtagtttctctgtaaggcaaaataatctaaaaagactaacctgcccacccactccttatattgctgtgagattgcccctatcttgtgctcttctgtctgcagtgtgcacggccttgttctaacccggaataaaggtgattgattgtattgcaatataaggagtgggtgggcaggctagtctttttagattattttgccttacagagaaactactagactctgctgaaaagaaccctgtctctcttctcccatttcttccataagaaaggctccttattctctctctcactctaatgtaacatatcccaaatggaaggacagttcatgctcattccccccacccaattctacaagtatctctctcttcttaagggagaagccagacagggaaagggagacttgggaaggtcctttaaggcaaaactgtggagtcctagaggtgtgtgtgttaaggcaggtgtctgcagcagtggccagaggggcagggcacgctaggctgggctaggagttaagagtactgtctaaccagtctggcttcttccttcttccagcagccagccctcccctcccattaaagttttactcccacatcctaaaagctcctaacttgaactttgtctaaatagtctctgagactgcatgtgaatttaatgttttttgaaaaagccttcttttttgtttggnctatggtagcaatttgattctgccactcccttcactgtggcattcccctcccanccccgctctggcctagacaataagttaat

SEQ ID NO: 165 - DNA, 2822 bp, Homo sapiens
  misc_feature: Template ID: 252747.21
gcgtaacgagggggtgcgtgtgaggtcatcgcgcgggcgggcgggcggggtctggcggtttgaacgagacgaagacggaaccggagccggttgcgggcagtggacgcggttctgccgagagccgaagatggcagtgaacgtatactcaacgtcagtgaccagtgataacctaagtcgacatgacatgctggcctggatcaatgagtctctgcagttgaatctgacaaagatcgaacagttgtgctcaggggctgcgtattgtcagtttatggacatgctgttccctggctccattgccttgaagaaagtgaaattccaagctaagctagaacacgagtacatccagaacttcaaaatactacaagcaggttttaagagaatgggtgttgacaaaataattcctgtggacaaattagtaaaaggaaagtttcaggacaattttgaattcgttcagtggttcaagaagtttttcgatgcaaactatgatggaaaagactatgaccctgtggctgccagacaaggtcaagaaactgcagtggctccttcccttgttgctccagctctgaataaaccgaagaaacctctcacttctagcagtgcagctccccagaggcccatctcaacacagagaaccgctgcggctcctaaggctggccctggtgtggtgcgaaagaaccctggtgtgggcaacggagacgacgaggcagctgagttgatgcagcaggtcaacgtattgaaacttactgttgaagacttggagaaagagagggatttctacttcggaaagctacggaacattgaattgatttgccaggagaacgagggggaaaacgaccctgtattgcagaggattgtagacattctgtatgccacagatgaaggctttgtgatacctgatgaagggggcccacaggaggagcaagaagagtattaacagcctggaccagcagagcaacatcggaattcttcactccaaatcatgtgcttaactgtaaaatactcccttttgttatccttagaggactcactggtttcttttcataagcaaaaagtacctcttcttaaagtgcactttgcagacgtttcactccttttccaataagtttgagttaggagcttttaccttgtagcagagcagtattaacacctagttggttcacctggaaaacagagaggctgaccgtggggctcaccatgcggatgcgggtcacactgaatgctggagagatgttatgtaatatgctgaggtggcgacctcagtggagaaatgtaaagactgaattgaattttaagctaatgtgaaatcagagaatgttgtaataagtaaatgccttaagagtatttaaaatatgcttccacatttcaaaatataaaatgtaacatgacaagagattttgcgtttgacattgtgtctgggaaggaagggccagaccttggaacctttggaacctgctgtcaacaggtcttacagggctgcttgaaccctcataggcctaggctttggtctaaaaggaacatttaaaaagttgccctgtaaagttatttggtgtcattgaccaattgcatcccagctaaaaagcaagaggcatcgttgcctggataatagaggatgtgtttcagccctgagatgttacagttgaagagcttggttttcattgagcatttctctatttttccagttatccccgaaatttctatgtattatattttttggggaagtgaggtgtgcccagttttttaatctaacaactacttttggggacttgcccacatctctgggatttgaatggggattgtatcccattttactgtcttttaggtttacatttaccacgtttctcttctctgctccccttgcccactggggactcctctttggctccttgaagtttgctgcttagagttggaagtgcagcaggcaggtgatcatgctgcaagttctttctggacctctggcaaagggagtggtcagtgaaggccatcgttaccttgggatctgccaggctggggtgttttcggtatctgctgttcacagctctccactgtaatccgaatactttgccagtgcactaatctctttggagataaaattcattagtgtgttactaaatgttaattttcttttgcggaaaatacagtaccgtgtctgaattaattattaatatttaaaatacttcattccttaactctccctcatttgctttgcccacagcctattcagttcctttgtttggcaggattctgcaaaatgtgtctcacccactactgagattgttcagcccctgatgtatttgtattgatttgtttctggtggtagcttgtcctgaaatgtgtgtagaaagcaagtattttatgataaaaatgttgtgtagtgcatgctctgtgtggaattcagaggaaaacccagattcagtgattaacaatgccaaaaaatgcaagtaactagccattgttcaaatgacagtggtgctatttctcttttgtggccttttagacttttgttgccctaaaattccattttattgggaacccattttccacctggtctttcttgacagggtttttttggatttcctctaggatttcgccagttcctacaacgtgcagtagggcggcggtagctcttgtgtctgtggactctgctcagctgtgtccgtaggagtcggatgtgtctgtgctttattatggccttgtttatatatcactgaggtatactatgccatgtaaatagactattttttataatctttacatgctggtttaaattcagaaggaaatagatcaaggaaatatatatattttcttctaaaacttattaaatt

SEQ ID NO: 166 - DNA, 4065 bp, Homo sapiens
  misc_feature: Template ID: 229250.3
ggcgaatctcctccggccactgccgccgcggtcgcctctcacccgccccggccgctccagcccgaggcgccccgaccccgcgccactccgcgcccggccagccgcccgcagccatggggctcctgcccaagctcggcgcgtcccagggcagcgacacctctactagccgagccggccgctgtgcccgctcggtcttcggcaacattaaggtgtttgtgctctgccaaggcctcctgcagctctgccaactcctgtacagcgcctacttcaagagcagcctcaccaccattgagaagcgctttgggctctccagttcttcatcaggtctcatttccagcttgaatgagatcagcaatgccatcctcatcatctttgtcagctactttggcagccgggtgcaccgtccacgtctgattggcatcggaggtctcttcctggctgcaggtgccttcatcctcaccctcccacacttcctctccgagccctaccagtacaccttggccagcactgggaacaacagccgcttgcaggccgagctctgccagaagcattggcaggacctgcctcccagtaagtgccacagcaccacccagaacccccagaaggagaccagcagcatgtggggcctgatggtggttgcccagctgctggctggcatcgggacagtgcctattcagccatttgggatctcctatgtggatgacttctcagagcccagcaactcgcccctgtacatctccatcttatttgccatctctgtatttggaccggctttcgggtacctgctgggctctgtcatgctgcagatctttgtggactatggcagggtcaacacagctgcagttaacttggtcccgggtgacccccgatggattggagcctggtggctaggcctgctcatttcttcagctttattggttctcacctctttccccttttttttcttccctcgagcaatgcccataggagcaaagagggctcctgccacagcagatgaagcaaggaagttggaggaggccaagtcaagaggctccctggtggatttcattaaacggtttccatgcatctttctgaggctcctgatgaactcactcttcgtcctggtggtcctggcccagtgcaccttctcctccgtcattgctgggcctctccaccttcctcaacaagttcctggagaagcagtatggcacctcagcagcctatgccaacttcctcattggtgctgtgaacctccctgctgcagccttggggatgctgtttggaggaatcctcatgaagcgctttgttttctctctacaagccattccccgcatagctaccaccatcatcaccatctccatgatcctttgtgttcctttgttcttcatgggatgctccaccccaactgtggccgaagtctacccccctagcacatcaagttctatacatccgcagtctcctgcctgccgcagggactgctcgtgcccagattctatcttccacccggtctgtggagacaatggaatcgagtacctctccccttgccatgccggctgcagcaacatcaacatgagctctgcaacctccaagcaactgatctatttgaactgcagctgtgtgaccgggggatccgcttcagcaaagacaggatcgtgccctgtcccctgtgcccacttcctgctcccggccatcttcctcatctccttcgtgtccctgatagcctgcatctcccacaaccccctctacatgatggttctgcgtgtggtgaaccaggaggaaaagtcatttgccatcggggtgcagttcttgttgatgcgcttgctggcctggctgccatctccagccctctatggcctcaccattgaccactcctgcatccggtggaactcgctgtgcttggggaggcgaggggcctgcgcctactatgacaacgatgctctccgagacaggtacctgggcctgcagatgggctacaaggcgctgggcatgctgctgctttgcttcatcagctggagggtgaagaagaacaaggagtacaacgtgcagaaggcggcaggcctcatctgaccccaccctgggccactgccctgctccagagagtggaccttgactcttccacacctgcctatactcactaatgttaacacgtcatttcctttttgtatttttaaacaagaaagaaaaccccagtcctcatttgccttccctacctcttcctcccagagtcctccccacagttcctaagggccactgtgtacccgggctgtgtgggccagaactggggggctgagtcttccctggccccttggaagaggcccccagatgcccaggctcacttcagtgttgagtcctccattgaggatgcccactgaggcagccaggcccctcaccagccctggggggaatcctaaacagagagagaaaaagggtatctgcccttcttgccaggcagctccactctcccgctgactgcccacaccctgcagagtggcaggggtgaaaggaagaaggaagtggctgagttattaatagccagagccactgggagactggggagactggctgtaacccccttcacacctgggtttggcatcagcacagactacgggaggggctggctccctccccctcagaccctcacttcctgtacctagaggccattctggatgctgccatgttgggaagtacagtctctgcccattacctgcatgcaggcaccagagcagggactgagaaaccccaaggatgggtcatctaagtgctgtccatatgaaccctggactttctgtccttagatcctcacatgttatccctgtctttctggggtacgtttcaaactgaggaagctacaacacagtgaagacccaaggaaggcctatgaaatggtcctgatgcccaacctcccaccccttcaatgtggggacgagaccccctcatctcagagtaatgggaagaacctcccacatctccctggcagcagatgaggtggcttcacatgcacttccctgtctggacttcagcccgtattccgaggagtagagaggcagaagagatgtcagcaaagcaagtgatgaagcagagtggatgtccactgtcaccaagctggatggcaagctgcggcccacaaaacagccagtcaggttggctttcctggtttcagacatgctcataccattcccattttctcagcctcttctcactgcctccagagaggtgggtgcctgggttgagagacacagctgctacgtgatagatgttgagagacagaagccaacgaaggaggtcattcatcaacaaatatatttattggagaccgactttgtgcaaagcaatgctaatcagggttctccatggagcttccctcagctcttacctcacctccctccatttacattagggccttctcccagggtgtgctcggtgggcagtgtgggactgggggtgtgggagttggtgagagcaggaggagaggtggggacagcaagaagccacagattggcatgaaggatcctgacctgactatccatgccatccatggcccccagactgactctgcacctggccctttgccagacagctctgtctccccatgtcctctggaacagctgggcatgggtcatggccattcatgacccttaagtgccacccttcttggaagaccccctccagaagcatactggaagccacctctggaaaagcctcatatggtgatatgccaaaatatttatgtcaatgtccaaacaaagtccaatgccatgagactgaagtctttgtggaaaccactgttacagacaagcttatttccaaagccacctcatttccaaacatctcactcaggaagggaggctcaatgtaacctcaggggccagttttagcatttgaaatggttctgcttggaaaatgatgccctgcaactaaccctggtctttcccatggcaatttaaccacatttggaaggcactgccttcagctgagtttatgaacaatgaatgccaaccttcaggttctagaagattggttgcactcccaaacctttattctattatattactattaaaatattctaattttgctattgaggtaaaa

SEQ ID NO: 167 - DNA, 5049 bp, Homo sapiens
  misc_feature: Template ID: 331734.3
ggcgcacgcacaggagcctgcactctgcgtcccgcaccccagcagccgcgccatgagccggagtctcttgctccggttcttgctgttcctgctcctgctcccgccgctccccgtcctgctcgcggacccaggggcgcccacgccagtgaatccctgttgttactatccatgccagcaccagggcatctgtgtccgcttcggccttgaccgctaccagtgtgactgcacccgcacgggctattccggccccaactgcaccatccctggcctgtggacctggctccggaattcactgcggcccagcccctctttcacccacttcctgctcactcacgggcgctggttctgggagtttgtcaatgccaccttcatccgagagatgctcatgcgcctggtactcacagtgcgctccaaccttatccccagtccccccacctacaactcagcacatgactacatcagctgggagtctttctccaacgtgagctattacactcgtattctgccctctgtgcctaaagattgccccacacccatgggaaccaaagggaagaagcagttgccagatgcccagctcctggcccgccgcttcctgctcaggaggaagttcatacctgacccccaaggcaccaacctcatgtttgccttctttgcacaacacttcacccaccagttcttcaaaacttctggcaagatgggtcctggcttcaccaaggccttgggccatggggtagacctcggccacatttatggagacaatctggagcgtcagtatcaactgcggctctttaaggatgggaaactcaagtaccaggtgctggatggagaaatgtacccgccctcggtagaagaggcgcctgtgttgatgcactacccccgaggcatcccgccccagagccagatggctgtgggccaggaggtgtttgggctgcttcctgggctcatgctgtatgccacgctctggctacgtgagcacaaccgtgtgtgtgacctgctgaaggctgagcaccccacctggggcgatgagcagcttttccagacgacccgcctcatcctcataggggagaccatcaagattgtcatcgaggagtacgtgcagcagctgagtggctatttcctgcagctgaaatttgacccagagctgctgttcggtgtccagttccaataccgcaaccgcattgccatggagttcaaccatctctaccactggcaccccctcatgcctgactccttcaaggtgggctcccaggagtacagctacgagcagttcttgttcaacacctccatgttggtggactatggggttgaggccctggtggatgccttctctcgccagattgctggccggatcggtgggggcaggaacatggaccaccacatcctgcatgtggctgtggatgtcatcagggagtctcgggagatgcggctgcagcccttcaatgagtaccgcaagaggtttggcatgaaaccctacacctccttccaggagctcgtaggagagaaggagatggcagcagagttggaggaattgtatggagacattgatgcgttggagttctaccctggactgcttcttgaaaagtgccatccaaactctatctttggggagagtatgatagagattggggctcccttttccctcaagggtctcctagggaatcccatctgttctccggagtactggaagccgagcacatttggcggcgaggtgggctttaacattgtcaagacggccacactgaagaagctggtctgcctcaacaccaagacctgtccctacgtttccttccgtgtgccggatgccagtcaggatgatgggcctgctgtggagcgaccatccacagagctctgaggggcaggaaagcagcattctggaggggagagctttgtgcttgtcattccagagtgctgaggccagggctgatggtcttaaatgctcattttctggtttggcatggtgagtgttggggttgacatttagaactttaagtctcacccattatctggaatattgtgattctgtttattcttccagaatgctgaactccttgttagcccttcagattgttaggagtggttctcatttggtctgccagaatactgggttcttagttgacaacctagaatgtcagatttctggttgatttgtaacacagtcattctaggatgtggagctactgatgaaatctgctagaaagttagggggttcttattttgcattccagaatcttgactttctgattggtgattcaaagtgttgtgttcctggctgatgatccagaacagtggctcgtatcccaaatctgtcagcatctggctgtctagaatgtggatttgattcattttcctgttcagtgagatatcatagagacggagatcctaaggtccaacaagaatgcattccctgaatctgtgcctgcactgagagggcaaggaagtggggtgttcttcttgggacccccactaagaccctggtctgaggatgtagagagaacaggtgggctgtattcacgccattggttggaagctaccagagctctatccccatccaggtcttgactcatggcagctgtttctcatgaagctaataaaattcgctttctaaagttacctgttatatatctcttttggtcccatcctctaaagcagaggcaacactggaacatggctagcctttcttgtagccatggctgggcgtgctagaggttgcagcatgagactttctgctgggatccttgggcccatcactgtatagacatgctaccactggtacttcctttctccctgcgggccaggcactgcccttttcaggaagctctcttaaaatacccattgccccagacctggaagatataacattcagttcccaccatctgattaaaacaacttcctcccttacagagcatacaacagagggggcaccggggaggagagcacatactgtgttccaatttcacgcttttaattctcatttgttctcacaccaacagtgtgaagtgcgtggtataatctccatttcaaaaccaaggaagcagcctcagagtggtcgagtgacacacctcacgcaggctgagtccagagcttgtgctcctcttgattcctggtttgactcagttccaggcctgatcttgcctgtctggctcagggtcaaagacagaatggtggagtgtagcctccacctgatattcaggctactcattcagtcccaaatatgtattttcctaagtgtttactatgtgccagttcctgtaacaggtgtggggacacagcagtgagtaatcaatacagacaaggttctgcccttatggagctcacactccagtggcagacaaacagaccataaataaggaaacgatgaaataagatatatacaaggtgagtgtgacttcccttctaaccccctctgctctgtcctcccctattgcgctctcaagaccagagacccaacagcagtgatctcagggcagacagccctccactccagctctgagacccttttctcaggacctctgtaggcagcagagagagaggacagaggggtaagatgaggggttgagggaaggttcttcatgatccacactttgggcttagtatttctcaggaagagctatggcccagaaacaacaggggaaactagagttcggtctgacagtccttggggttaagtctcctgtcttatggtccagaaactcctgtttctccttagttggctggaaactgctcccatcattccttctggcctctgctgaatgcagggaatgcaatccttccctgctcttgcagttgctctgacgtagaaagatccttcgggtgctggaagtctccatgaagagcttgtgtcctgtcctttcttgcagattctatttcccctcttctgctaatacctcttactttgcttgagaatcctctcctttcttattaatttcagtcttggtggttctatcaggggtgcattctggccaaggggtgggcctgtgaatcaatcctgggcaatcagacaccctctccttaaaaactggcccgtggagactgagatcactgactctgactcatccccacagctggctctgacaagatggtccatttgttcctgcttccgagatccccagggcagcctggatccctgcccttctcaagactttagcttttccttccatccggtggcctattccaggaattcctcttttgcttaaatcagttggagtttgtgtctgttgcttgtaatcaagcctttatggctgctgggctgagtgacacaagcactttaatggcctggagggacttttaatcagtgaagatgcaatcagacaagtgttttggaaagagcaccctcgagaagggtggatgacagggcagagcaggaaggacaggaagctggcagaacggaggaggctgcagccgtggtccaaccaggagctgatggcagctggggctaggggaagggctttgagggtggaaggatgggatgggttccagaggtattcctctcttaaatgcaagtgcctagattaggtagactttgcttagtattgacaactgcacatgaaagttttgcaaagggaaacaggctaaatgcaccaagaaagcttcttcagagtgaagaatcttaatgcttgtaatttaaacatttgttcctggagttttgatttggtggatgtgatggttggttttatttgtcagtttggttgggctatagcacacagttatttaatcaaacagtaatctaggtgtggctgttgaaggtcattttgtagatgtgattaacatcctacaatcagttgactttaagtgaaagagattacttaaataatttgggtgagctgcacctgattagttgaaaggcctcaagaacaaacactgccagtttcctggaaaagaagaaactttgcctcaagactatagccatcgactcctgcctgagtttccagcctgctagtctgccctatggatttgaagtttgccaaccccaacaattgtgtgaattaatttctaaaaataaagctatatacagccatcctttggtatttgtgggggatttgtttcaggatc

SEQ ID NO: 168 - DNA, 2329 bp, Homo sapiens
  misc_feature: Template ID: 331734.8
  unsure 308, 400: a, t, c, g, or other
atgagccggagtctcttgctccggttcttgctgttcctgctcctgctcccgccgctccccgtcctgctcgcggacccaggggcgcccacgccagtgaatccctgttgttactatccatgccagcaccagggcatctgtgtccgcttcggccttgaccgctaccagtgtgactgcacccgcacgggctattccggccccaactgcaccatccctggcctgtggacctggctccggaattcactgcggcccagcccctctttcacccacttcctgctcactcacgggcgctggttctgggagtttgtcantgccaccttcatccgagagatgctcatgcgcctggtactcacagtggcgctccaaccttatgccccagtccccccacctacaactcagcacntgactacatcagctgggagtctttctccaacgtgagctattacactcgtattctgccctctgtgcctaaagattgccccacacccatgggaaccaaagggaagaagcagttgccaggtgcccagctcctggcccgccgcttcctgctcaggaggaagttcatacctgacccccaaggcaccaacctcatgtttgccttctttgcacaacacttcacccaccagttcttcaaaacttctggcaagatgggtcctggcttcaccaaggccttgggccatggggtagacctcggccacatttatggagacaatctggagcgtcagtatcaactgcggctctttaaggatgggaaactcaagtaccaggtgctggatggagaaatgtacccgccctcggtagaagaggcgcctgtgttgatgcactacccccgaggcatcccgccccagagccagatggctgtgggccaggaggtgtttgggctgcttcctgggctcatgctgtatgccacgctctggctacgtgagcacaaccgtgtgtgtgacctgctgaaggctgagcaccccacctggggcgatgagcagcttttccagacgacccgcctcatcctcataggggagaccatcaagattgtcatcgaggagtacgtgcagcagctgagtggctatttcctgcagctgaaatttgacccagagctgctgttcggtgtccagttccaataccgcaaccgcattgccatggagttcaaccatctctaccactggcaccccctcatgcctgactccttcaagatcggtgggggcaggaacatggaccaccacatcctgcatgtggctgtggatgtcatcagggagtctcgggagatgcggctgcagcccttcaatgagtaccgcaagaggtttggcatgaaaccctacacctccttccaggagctcgtaggagagaaggagatggcagcagagttggaggaattgtatggagacattgatgcgttggagttctaccctggactgcttcttgaaaagtgccatccaaactctatctttggggagagtatgatagagattggggctcccttttccctcaagggtctcctagggaatcccatctgttctccggagtactggaagccgagcacatttggcggcgaggtgggctttaacattgtcaagacggccacactgaagaagctggtctgcctcaacaccaagacctgtccctacgtttccttccgtgtgccggatgccagtcaggatgatgggcctgctgtggagcgaccatccacagagctctgaggggcaggaaagcagcattctggaggggagagctttgtgcttgtcattccagagtgctgaggccagggctgatggtcttaaatgctcattttctggtttggcatggtgagtgttggggttgacatttagaactttaagtctcacccattatctggaatattgtgattctgtttattcttccagaatgctgaactccttgttagcccttcagattgttaggagtggttctcatttggtctgccagaatactgggttcttagttgacaacctagaatgtcagatttctggttgatttgtaacacagtcattctaggatgtggagctactgatgaaatctgctagaaagttagggggttcttattttgcattccagaatcttgactttctgattggtgattcaaagtgttgtgttcctggctgatgatccagaacagtggctcgtatcccaaatctgtcagcatctggctgtctagaatgtggatttgattcattttcctgttcagtgagatatcatagagacggagatcctaaggtccaacaagaatgcattccctgaatctgtgcctgcactgagagggcaaggaggtggggtgttcttcttgggacccccactaagacctggtctgaggatgtagaga

SEQ ID NO: 169 - DNA, 5673 bp, Homo sapiens
  misc_feature: Template ID: 441261.5
  unsure 5517-5518: a, t, c, g, or other
cccgagtgtcggttcactgtggagacagcggtggcggagtgggtctccagggctctgggctggcaaggcccccggaggggtggggcgcggaggaggctacagatccgcttccgcgcggcggggccgggtgcttgggacgcggctctgggctcccgggataaggggctcccgggacaaggggctcccggagagcccagtggttagcgatgctgctgtcgccgtcgctgctgctgctgctgctgctggggggcgccgcgggctgcgccgagggtgtggcggcggcgcttacccccgagcggctcctggagtggcaggataaaggaatatttgttatccaaagtgagagtctcaagaaatgcattcaagcaggtaaatcggttctgaccctcggtagaactggaagcaagcaagcaaacaagcacatgctgtggaaatgggtttcaaaccatggcctctttaacataggaggcagcggttgcctgggcctgaatttctccgccccagagcagccattaagcttatatgaatgtgactccaccctcgtttccttacggtggcgctgtaacaggaagatgatcacaggcccgctgcagtactctgtccaggtggcgcatgacaacacagtggtggcctcacggaagtatattcataagtggatttcttatgggtcaggtggtggagacatttgtgaatatctacacaaagatttgcatacaatcaaagggaacacccacgggatgccgtgtatgtttcccttccagtataaccatcagtggcatcatgaatgtacccgtgaaggtcgggaagatgacttactgtggtgtgccacgacaagccgttatgaaagagatgaaaagtggggattttgccctgatcccacctctgcagaagtaggttgtgatactatttgggagaaggacctcaattcacacatttgctaccagttcaacctgctttcatctctctcttggagtgaggcacattcttcatgccagatgcaaggaggtacgctgttaagtattacagatgaaactgaagaaaatttcataagggagcacatgagcagtaaaacagtggaggtgtgggttggcctcaatcagcttgatgaagacgctggctggcagtggtctgatggaacgccgctcaactatctgaattggagcccagaggtaaattttgagccatttgttgaagatcactgtggaacatttagttcatttatgccaagtgcctggaggagtcgggattgtgagtccaccttgccatatatatgtaaaaaatatctaaaccacattgatcatgaaatagttgaaaaagatgcgtggaaatattatgctacccactgtgagcctggctggaatccctacaatcgtaattgctacaaacttcagaaagaagaaaagacctggcatgaggctctgcgttcttgtcaggctgataacagtgcattaatagacataacctcattagcagaggtggagtttcttgtaaccctccttggagatgaaaatgcatcagaaacatggattggtttgagcagcaataaaattccagtttcctttgaatggtctaatgactcttcagtcatctttactaattggcacacacttgagccccacatttttccaaatagaagccagctgtgtgtctcagcagagcagtctgagggacactggaaagtcaaaaattgtgaagaaagacttttttacatttgtaaaaaagcaggccatgtcctctctgatgctgaatcaggatgtcaagagggatgggaggagacatgtggattctgttacaaaattgacacagtccttcgaagctttgaccaagcttccagcggttattactgtcctcctgcacttgtaaccattacaaacaggtttgaacaggcttttattaccagtttgatcagtagtgtggtaaaaatgaaggacagttatttttggatagctcttcaggaccaaaatgatacgggagaatacacttggaagccagtagggcagaaacccgagccggtgcagtacacacactggaacacacaccagccgcgctacagtggtggctgtgttgccatgcgaggaaggcatccacttggtcgctgggaagtgaagcactgtcggcactttaaggcaatgtccttgtgcaagcagccagttgaaaatcaggaaaaagcagagtatgaagagagatggccctttcacccctgctatttggactgggagtcagagcctggtctggccagttgcttcaaggtatttcatagtgaaaaagttctgatgaaaagaacatggagagaagctgaagcattttgcgaagaatttggagctcatcttgcaagctttgcccatattgaggaagagaattttgtgaatgagctcttacattcaaaatttaattggacagaagaaaggcagttctggattggatttaataaaagaaacccactgaatgccggctcatgggagtggtctgatagaactcctgttgtctcttcgtttttagacaacacttattttggagaagatgcaagaaactgtgctgtttataaggcaaacaaaacattgctgcccttacactgtggttccaaacgtgaatggatatgcaaaatcccaagagatgtgaaacccaagattccgttctggtaccagtacgatgtaccctggctcttttatcaggatgcagaatacctttttcatacctttgcctcagaatggttgaactttgagtttgtctgtagctggctgcacagtgatcttctcacaattcattctgcacatgagcaagaattcatccacagcaaaataaaagcgctatccaagtatggtgcaagttggtggattggacttcaagaagaaagagccaatgatgaatttcgctggagagatggaacaccagtgatataccagaactgggacacaggaagagaaagaactgtgaataatcagagccagagatgtggctttatttcttttataacaggactctggggtagtgaagagtgttcagtttctatgcctagtatctgtaagcgaaaaaaggtttggctcatagagaaaaagaaagatacaccaaaacaacatggaacgtgtcccaaaggatggctatattttaactataagtgccttctgctgaatatccccaaagacccaagcagttggaagaactggacgcatgctcaacatttctgtgctgaagaaggggggaccctggtcgccattgaaagtgaggtggagcaagctttcattactatgaatctttttggccagaccaccagtgtgtggataggtttacaaaatgatgattatgaaacatggctaaatggaaagcctgtggtatattctaactggtctccatttgatataataaatattccaagtcacaataccactgaagttcagaaacacattcctctctgtgccttactctcaagtaatcctaattttcatttcactggaaaatggtattttgaagactgtggaaaggaaggctatgggtttgtttgtgaaaaaatgcaagatacttctggacacggtgtaaatacatctgatatgtatccaatgcccaataccttagaatatggaaacagaacttacaaaataattaatgcaaatatgacttggtatgcagcaataaaaacctgcctgatgcacaaagcacaactggtcagcatcacagaccagtatcaccagtccttcctcactgttgtcctcaaccggctaggatatgcccactggattggactgttcaccacagataatggtcttaattttgactggtctgatggcaccaaatcttctttcactttttggaaagatgaggagtcctccctccttggtgactgcgtttttgccgacagcaacggacgctggcatagcacagcctgcgagtcatttctgcaaggtgccatttgtcatgtgccacctgaaacaagacaatctgaacacccagagttgtgctcagaaacatctattccctggataaaatttaaaagtaattgctacagtttttctacagtcctagacagtatgagttttgaggctgctcatgaattttgcaaaaaggaaggttctaatcttttaacaatcaaggatgaggctgaaaatgcatttctcctagaagagctgtttgcttttggttcttctgtccagatggtttggttgaatgctcaatttgatggtaacaatgaaaccataaagtggtttgatggaactcccacagaccagtcaaactggggcattcggaagccagacacagactacttcaagccccatcattgtgttgccttgaggatccctgaaggattatggcagctatccccgtgtcaagaaaaaaaaggctttatatgtaaaatggaggcagatattcacactgcagaggcgctgccagaaaaaggaccaagtcacagcatcattcctcttgcggttgtactgacactgatagtcattgtggccatttgcacactttccttctgcatatacaagcataacggtggcttcttcaggagacttgcagggtttcggaatccttactatcctgcaaccaactttagtacagtatatttagaagaaaatattctcatttctgatcttgagaagagtgaccaataataatgaggtcagagaatgccacagacaccagggtaagtaaagaagactaaacaggagtctcatctgtctttccctttacagcacagatgccattagaatgtgaattgggtcactattttaattattcttgaagtgattactggttttgaatcttaaccaaatcagatgggttttgatttattcatttccctaaactgtgatccattcttaaaaggggtaaattatgcattggttatttttcagaaagacaagaactattaaaagaaactccctattgaaaactctgaaatcaatgcgaataatagtttttgcattaatgtatctctactaaaattggggggaattttaaaactaatctggtatctattcagacatttacctgcactcgtaccattaagaaagacagaaagaagccaaaaaaaattaatcttgtatatgaggggaaaaggaaagggcttctgagaggattcttagttgtttcttttgaattccttttaatagcaggatttggaaaatactaatttctgtgcttaagggtcacaggttctgggctctcaactgatatttaaggtgacattcatttttattaggtctaacatctcaagctaaaggagaaagaaaaataccttcttttaaatggcaaagaccttcattagcagcacacttttataaacaaccatatagttaaaatgtggccttaaactttcaattactaaatgatgattaagttggatattttaaaatgtcttatacataagcttaaagtaatatattgaaactttaacagttgtactgttaaaactcatggactttctgaaaaactaaatatataaaataatatgttacactcttaataactggaagatataaaatgtaacttggatttaaaggagaagagctaaagatctgaatnntagtctcattagaaccagacagatgttgttgagaagtactaaataaattagtaatctagatatctttattatgtaaatgagtttaggtgttctatttaataaactattttctgggaacgatctccttttatattagtctagtgtagtgtagatgg

SEQ ID NO: 170 - DNA, 4130 bp, Homo sapiens
  misc_feature: Template ID: 411208.4
  unsure 4118: a, t, c, g, or other
gcttggcgctggctcccggaatatggagccctgggcgcgggggcggcgtgtcaggtggttgcggagctggtaagaatcatattctaagaactcagccactcaggtatccaccatggtgctgggtcctgaacagaagatgtcagatgacagtgtttctggagatcatggggagtctgccagtcttggtaacatcaaccctgcctatagtaatccctctctttcacagtcccctggggactcagaggagtacttcgccacttactttaatgagaagatctccattcctgaggaggagtactcttgttttagctttcgtaaactctgggctttcaccggaccaggttttcttatgagcattgcctacctggatccaggaaatattgaatccgatttgcagtctggagcagtggctggatttaagttgctctggatccttctgttggccacccttgtggggctgctgctccagcggcttgcagctagactgggagtggttactgggctgcatcttgctgaagtatgtcaccgtcagtatcccaaggtcccacgagtcatcctgtggctgatggtggagttggctatcatcggctcagacatgcaagaagtcattggctcagccattgctatcaatcttctgtctgtaggaagaattcctctgtggggtggcgttctcatcaccattgcagatacttttgtatttctcttcttggacaaatatggcttgcggaagctagaagcattttttggctttctcatcactattatggccctcacatttggatatgagtatgttacagtgaaacccagccagagccaggtactcaagggcatgttcgtaccatcctgttcaggctgtcgcactccacagattgaacaggctgtgggcatcgtgggagctgtcatcatgccacacaacatgtacctgcattctgccttagtcaagtctagacaggtaaaccggaacaataagcaggaagttcgagaagccaataagtactttttcattgaatcctgcattgcactctttgtttccttcatcatcaatgtctttgttgtctcagtctttgctgaagcattttttgggaaaaccaacgagcaggtggttgaagtctgtacaaataccagcagtcctcatgctggcctctttcctaaagataactcgacactggctgtggacatctacaaagggggtgttgtgctgggatgttactttgggcctgctgcactctacatttgggcagtggggatcctggctgcaggacagagctccaccatgacaggaacctattctggccagtttgtcatggagggattcctgaacctaaagtggtcacgctttgcccgagtggttctgactcgctctattgccatcatccccactctgcttgttgctgtcttccaagatgtagagcatctaacagggatgaatgactttctgaatgttctacagagcttacagcttccctttgctctcatacccatcctcacatttacgagcttgcggccagtaatgagtgactttgccaatggactaggctggcggattgcaggaggaatcttggtccttatcatctgttccatcaatatgtactttgtagtggtttatgtccgggacctagggcatgtggcattatatgtggtggctgctgtggtcagcgtggcttatctgggctttgtgttctacttgggttggcaatgtttgattgcactgggcatgtccttcctggactgtgggcatacggtaagcatctctaaaggcctgctgacagaagaagccacccgtggctacgttaaataacactggattagtctgtcttctgcaggtagccatcagagccagtgtgtttctatggtttactgtgtgaacatagccaaaagtatgtgccgttgcacagactgtgtttatgactcaaccgttggttggaaaagactttgtttcatgtgtatttgaaagatggaattattttttccttcctgacctaaccttagaactggattagggtgggatctttgaaaagctgacatttgctgctatcattccaacactaaattcttaagtagttgcccaagggccagctcagtttatccttcggagagacaaggatatgcatgattcttaaccaggctatatgttaaaaaaaaattggaaaatgcaatacattttttattatacaaactacagaatgagtatgcaagttttatttatcaaaatgtaatggatttttaaaggctgagaaattttccttatacctaccttttcagttattttaattataccaaattatcaactagaatagcttcatccatatgaaatataaaatgaagagacacctagctctatcaggcttaggattctttgaacttatttccactttaatttctcagtggaagttaagaggggtgagaaaacaaagaaggggaaaaactgacaactaacaaaaccagcaccacatcgctaggtggtgcttactaattaccttctcaggattttcctcagattgaaaagcttatgaggatttcttgggagtcttaataacctgcctgttagtacagagctttcctgatgatatttactcttgagcacatgtggttgtaaaaccttaactttctttctccaggagggtggtgatagaaacagatggtagtatttatgaactgatgttctcgtgaaatgttgagggtggggagaaaagactttaagggaggagagccatctattttgttcctaaagccacctctcagcagaatcgtcatgtttttctgatgcaccgctctgcttcatgcccaagatgacttgcgaggcaatctcaggagctgtggacttaaccattgcaaagcacactgtctttctcagcgttctctgcaagtcagtaggtgttagtatggttgcaaagttcactgtctcagcaaagttgaactgggctacctctctacagctgtttcctcagagggaaaaatcttgagaccagatggtggagctctggagtcagaggaaatgggtgtcttcagcacaaagctgctgcttttacttcagccacttctgacatttttacataccgagcctgagattgtgtgattatctcaaatcaaatcactttgatggagataaataatcaaaactgttttatagtcattgatttggtgagaacagtaatggaaaatggtgttgaaggacttctcatttttggagctttccttccagagtcctggctgattggtgttcgctgttcatctgagcccccaaaagcattattactgatacttgcacacagtcaaaagcgcagactggatggatggtcttttataaggcatttaagggtacactactgtgtttcactgaccatacatttttcttagcccctcaagtaatatagcacagagttatgaatgacaattcccctaaccattcctcttcatatctgcctcttccccttaccatcgtaattctccaaactggtcataaaggcactctgtgaagatattggggactgacatcttaagctctcacctggctgcagtaggaaaggccaaactgacgacaaaaaaaaaattctttataaagatgatatggtaacatgtatctttgccctgggtctgggtgggtccagtcagtctcagatttacaagcatttaggagcctaggtaaaagctgctagtattcttttaaaagttatatttatgacttgcaatgatagaaaactccttccaattaaatggcattttataatattatgtgtgtacttcacagtgttaaaaataccctcatacgttattgcatttgatcttcacagaaagtgcattttaaccagtactctgggtgcaataaataatatgtagaaatttaagtcctccaattccagcatatccagtgagttttgacagtgtgtttatgtggaatgtttaaggatatacaattgtactttatataaattggttcttgttcttcttaaatgtgacatgaaataattgtgctgctacattatactggaaattaacaggggaaaagggaagagctcttggctcccttgaggttctgctagtggtgttaggagtggttacaactgagcttttagtaaccatttaaccgtatgtaaacttggtttctaattaaaaaaaantttctttttcca

SEQ ID NO: 171 - DNA, 2831 bp, Homo sapiens
  misc_feature: Template ID: 335940.2
atggaacagacaagcaggttgtcttgtgttaaagaaaatgagatataagtcagttactcccggaggcaatgctgctgttcagctcttctgtttttgtggccagggtcttcatgaacactaataggggtaccaggccctcttcctcgttagaagaaatcaggataacaaaggcatattgggcacccctacaaaaggaatctgtatctgtatcaagatgatctgaagaacagcttctacctttaggaatgtctagtgttccaaaatgactagcatcttccattttgccattatcttcatgttaatacttcagatcagaatacaattatctgaagaaagtgaatttttagttgataggtcaaaaaacggtctcatccacgttcctaaagacctatcccagaaaacaacaatcttaaatatatcgcaaaattatatatctgagctttggacttctgacatcttatcactgtcaaaactgaggattttgataatttctcataatagaatccagtatcttgatatcagtgttttcaaattcaaccaggaattggaatacttggatttgtcccacaacaagttggtgaagatttcttgccaccctactgtgaacctcaagcacttggacctgtcatttaatgcatttgatgccctgcctatatgcaaagagtttggcaatatgtctcaactaaaatttctggggttgagcaccacacacttagaaaaatctagtgtgctgccaattgctcatttgaatatcagcaaggtcttgctggtcttaggagagacttatggggaaaaagaagaccctgagggccttcaagactttaacactgagagtctgcacattgtgttccccacaaacaaagaattccattttattttggatgtgtcagtcaagactgtagcaaatctggaactatctaatatcaaatgtgtgctagaagataacaaatgttcttacttcctaagtattctggcgaaacttcaaacaaatccaaagttatcaaatcttaccttaaacaacattgaaacaacttggaattctttcattaggatcctccagctggtttggcatacaactgtatggtatttctcaatttcaaacgtgaagctacagggtcagctggacttcagagattttgattattctggcacttccttgaaggccttgtctatacaccaagttgtcagcgatgtgttcggttttccgcaaagttatatctatgaaatcttttcgaatatgaacatcaaaaatttcacagtgtctggtacacgcatggtccacatgctttgcccatccaaaattagcccgttcctgcatttggatttttccaataatctcttaacagacacggtttttgaaaattgtgggcaccttactgagttggagacacttattttacaaatgaatcaattaaaagaactttcaaaaatagctgaaatgactacacagatgaagtctctgcaacaattggatattagccagaattctgtaagctatgatgaaaagaaaggagactgttcttggactaaaagtttattaagtttaaatatgtcttcaaatatacttactgacactattttcagatgtttacctcccaggatcaaggtacttgatcttcacagcaataaaataaagagcattcctaaacaagtcgtaaaactggaagctttgcaagaactcaatgttgctttcaattctttaactgaccttcctggatgtggcagctttagcagcctttctgtattgatcattgatcacaattcagtttcccacccatcggctgatttcttccagagctgccagaagatgaggtcaataaaagcaggggacaatccattccaatgtacctgtgagctaggagaatttgtcaaaaatatagaccaagtatcaagtgaagtgttagagggctggcctgattcttataagtgtgactacccggaaagttatagaggaaccctactaaaggactttcacatgtctgaattatcctgcaacataactctgctgatcgtcaccatcgttgccaccatgctggtgttggctgtgactgtgacctccctctgcagctacttggatctgccctggtatctcaggatggtgtgccagtggacccagacccggcgcagggccaggaacatacccttagaagaactccaaagaaatctccagtttcatgcatttatttcatatagtgggcacgattctttctgggtgaagaatgaattattgccaaacctagagaaagaaggtatgcagatttgccttcatgagagaaactttgttcctgggcaagagcattgtggaaaatatcatcacctgcattgagaagagttacaagtccatctttgttttgtctcccaactttgtccagagtgaatggtgccattatgaactctactttgcccatcacaatctctttcatgaaggatctaatagcttaatcctgatcttgctggaacccattccgcagtactccattcctagcagttatcacaagctcaaaagtctcatggccaggaggacttatttggaatggcccaaggaaaagagcaaacgtggccttttttgggctaacttaagggcagccattaatattaagctgacagagcaagcaaagaaatagattacacatcaagtgaaaaatattcctcctgttgatattgctgcttttggaagttccaacaatgactttattttgcatcagcatagatgtaaacacaattgtgagtgtatgatgtaggtaaaaatatatacttcgggtcgcagttcaccatttatatgtggtattaaaaattaatgaaatgatataactttgatttaaacagttctg

SEQ ID NO: 172 - DNA, 4823 bp, Homo sapiens
  misc_feature: Template ID: 369213.26
ttacgggaatgggaatgtagttttagccctccaggattctatttagcccgccaggaattaaccttgactataaataggccatcaatgacctttccagagaatgttcagagacctcaactttgtttagagatcttgtgtgggtggaacttcctgtttgcacacagagcagcataaagcccagttgctttgggaagtgtttgggaccagatggattgtagggagtagggtacaatacagtctgttctcctccagctccttctttctgcaacatggggaagaacaaactccttcatccaagtctggttcttctcctcttggtcctcctgcccacagacgcctcagtctctggaaaaccgcagtatatggttctggtcccctccctgctccacactgagaccactgagaagggctgtgtccttctgagctacctgaatgagacagtgactgtaagtgcttccttggagtctgtcaggggaaacaggagcctcttcactgacctggaggcggagaatgacgtactccactgtgtcgccttcgctgtcccaaagtcttcatccaatgaggaagtaatgttcctcactgtccaagtgaaaggaccaacccaagaatttaagaagcggaccacagtgatggttaagaacgaggacagtctggtctttgtccagacagacaaatcaatctacaaaccagggcagacagtgaaatttcgtgttgtctccatggatgaaaactttcaccccctgaatgagttgattccactagtatacattcaggatcccaaaggaaatcgcatcgcacaatggcagagtttccagttagagggtggcctcaagcaattttcttttcccctctcatcagagccccttccagggctcctacaaggtggtggtacagaagaaatcaggtggaaggacagagcaccctttcaccgtggaggaatttgttcttcccaagtttgaagtacaagtaacagtgccaaagataatcaccatcttggaagaagagatgaatgtatcagtgtgtggcctatacacatatgggaagcctgtccctggacatgtgactgtgagcatttgcagaaagtatagtgacgcttccgactgccacggtgaagattcacaggctttctgtgagaaattcagtggacagctaaacagccatggctgcttctatcagcaagtaaaaaccaaggtcttccagctgaagaggaaggagtatgaaatgaaacttcacactgaggcccagatccaagaagaaggaacagtggtggaattgactggaaggcagtccagtgaaatcacaagaaccataaccaaactctcatttgtgaaagtggactcacactttcgacagggaattcccttctttgggcaggtgcgcctagtagatgggaaaggcgtccctataccaaataaagtcatattcatcagaggaaatgaagcaaactattactccaatgctaccacggatgagcatggccttgtacagttctctatcaacaccaccaatgttatgggtacctctcttactgttagggtcaattacaaggatcgtagtccctgttacggctaccagtgggtgtcagaagaacacgaagaggcacatcacactgcttatcttgtgttctccccaagcaagagctttgtccaccttgagcccatgtctcatgaactaccctgtggccatactcagacagtccaggcacattatattctgaatggaggcaccctgctggggctgaagaagctctccttctattatctgataatggcaaagggaggcattgtccgaactgggactcatggactgcttgtgaagcaggaagacatgaagggccatttttccatctcaatccctgtgaagtcagacattgctcctgtcgctcggttgctcatctatgctgttttacctaccggggacgtgattggggattctgcaaaatatgatgttgaaaattgtctggccaacaaggtggatttgagcttcagcccatcacaaagtctcccagcctcacacgcccacctgcgagtcacagcggctcctcagtccgtctgcgccctccgtgctgtggaccaaagcgtgctgctcatgaagcctgatgctgagctctcggcgtcctcggtttacaacctgctaccagaaaaggacctcactggcttccctgggcctttgaatgaccaggacgatgaagactgcatcaatcgtcataatgtctatattaatggaatcacatatactccagtatcaagtacaaatgaaaaggatatgtacagcttcctagaggacatgggcttaaaggcattcaccaactcaaagattcgtaaacccaaaatgtgtccacagcttcaacagtatgaaatgcatggacctgaaggtctacgtgtaggtttttatgagtcagatgtaatgggaagaggccatgcacgcctggtgcatgttgaagagcctcacacggagaccgtacgaaagtacttccctgagacatggatctgggatttggtggtggtaaactcagcaggtgtggctgaggtaggagtaacagtccctgacaccatcaccgagtggaaggcaggggccttctgcctgtctgaagatgctggacttggtatctcttccactgcctctctccgagccttccagcccttctttgtggagctcacaatgccttactctgtgattcgtggagaggccttcacactcaaggccacggtcctaaactaccttcccaaatgcatccgggtcagtgtgcagctggaagcctctcccgccttcctagctgtcccagtggagaaggaacaagcgcctcactgcatctgtggcaaacgggcggcaaactgtgtcctgggcagtaaccccaaagtcattaggaaatgtgaatttcactgtgagcgcagaggcactagagtctcaagagctgtgtgggactgaggtgccttcagttcctgaacacggaaggaaagacacagtcatcaagcctctgttggttgaacctgaaggactagagaaggaaacaacattcaactccctactttgtccatcaggtggtgaggtttctgaagaattatccctgaaactgccaccaaatgtggtagaagaatctgcccgagcttctgtctcagttttgggagacatattaggctctgccatgcaaaacacacaaaatcttctccagatgccctatggctgtggagagcagaatatggtcctctttgctcctaacatctatgtactggattatctaaatgaaacacagcagcttactccagagatcaagtccaaggccattggctatctcaacactggttaccagagacagttgaactacaaacactatgatggctcctacagcacctttggggagcgatatggcaggaaccagggcaacacctggctcacagcctttgttctgaagacttttgcccaagctcgagcctacatcttcatcgatgaagcacacattacccaagccctcatatggctctcccagaggcagaaggacaatggctgtttcaggagctctgggtcactgctcaacaatgccataaagggaggagtagaagatgaagtgaccctctccgcctatatcaccatcgcccttctggagattcctctcacagtcactcaccctgttgtccgcaatgccctgttttgcctggagtcagcctggaagacagcacaagaaggggaccatggcagccatgtatataccaaagcactgctggcctatgcttttgccctggcaggtaaccaggacaagaggaaggaagtactcaagtcacttaatgaggaagctgtgaagaaagacaactctgtccattgggagcgccctcagaaacccaaggcaccagtggggcatttttacgaaccccaggctccctctgctgaggtggagatgacatcctatgtgctcctcgcttatctcacggcccagccagccccaacctcggaggacctgacctctgcaaccaacatcgtgaagtggatcacgaagcagcagaatgcccagggcggtttctcctccacccaggacacagtggtggctctccatgctctgtccaaatatggagcagccacatttaccaggactgggaaggctgcacaggtgactatccagtcttcagggacattttccagcaaattccaagtggacaacaacaaccgcctgttactgcagcaggtctcattgccagagctgcctggggaatacagcatgaaagtgacaggagaaggatgtgtctacctccagacatccttgaaatacaatattctcccagaaaaggaagagttcccctttgctttaggagtgcagactctgcctcaaacttgtgatgaacccaaagcccacaccagcttccaaatctccctaagtgtcagttacacagggagccgctctgcctccaacatggcgatcgttgatgtgaagatggtctctggcttcattcccctgaagccaacagtgaaaatgcttgaaagatctaaccatgtgagccggacagaagtcagcagcaaccatgtcttgatttaccttgataaggtgtcaaatcagacactgagcttgttcttcacggttctgcaagatgtcccagtaagagatctgaaaccagccatagtgaaagtctatgattactacgagacggatgagtttgcaattgctgagtacaatgctccttgcagcaaagatcttggaaatgcttgaagaccacaaggctgaaaagtgctttgctggagtcctgttctcagagctccacagaagacacgtgtttttgtatctttaaagacttgatgaataaacactttttctggtcaaaaaaaaagaaaaaaag

SEQ ID NO: 173 - DNA, 1702 bp, Homo sapiens
  misc_feature: Template ID: 222156.2
taaaagcagagcaggacctggaaagctggtttgtatgggctgcagcctgcccgctgagctgcatcatggtgcggtctgtggcctgggcaggtttcatggtcctgctgatgatcccatgggggctctgctgcaaaactggtctgctacttcaccaactgggcccagtacagacagggggaggctcgcttcctgcccaaggacttggaccccagcctttgcacccacctcatctacgccttcgctggcatgaccaaccaccagctgagcaccactgagtggaatgacgagactctctaccaggagttcaatggcctgaagaagatgaatcccaagctgaagaccctgttagccatcggaggctggaatttcggcactcagaagttcacagatatggtagccacggccaacaaccgtcagacctttgtcaactcggccatcaggtttctgcgcaaatacagctttgacggccttgaccttgactgggagtacccaggaagccaggggagccctgccgtagacaaggagcgcttcacaaccctggtacaggacttggccaatgccttccagcaggaagcccagacctcagggaaggaacgccttcttctgagtgcagcggttccagctgggcagacctatgtggatgctggatacgaggtggacaaaatcgcccagaacctggattttgtcaaccttatggcctacgacttccatggctcttgggagaaggtcacgggacataacagccccctctacaagaggcaagaagagagtggtgcagcagccagcctcaacgtggatgctgctgtgcaacagtggctgcagaaggggacccctgccagcaagctgatccttggcatgcctacctacggacgctccttcacactggcctcctcatcagacaccagagtgggggccccagccacagggtctggcactccaggccccttcaccaaggaaggagggatgctggcctactatgaagtctgctcctggaagggggccaccaaacagagaatccaggatcagaaggtgccctacatcttccgggacaaccagtgggtgggctttgatgatgtggagagcttcaaaaccaaggtcagctatctgaagcagaagggactgggcggggccatggtctgggcactggacttagatgactttgccggcttctcctgcaaccagggccgataccccctcatccagacgctacggcaggaactgagtcttccatacttgccttcaggcaccccagagcttgaagttccaaaaccaggtcagccctctgaacctgagcatggccccagccctggacaagacacgttctgccagggcaaagctgatgggctctatcccaatcctcgggaacggtccagcttctacagctgtgcagcggggcggctgttccagcaaagctgcccgacaggcctggtgttcagcaactcctgcaaatgctgcacctggaattgagtcgctaaagcccctccagtcccagctttgaggctgggcccaggatcactctacagcctgcctcctgggttttccctgggggccgcaatctggctcctgcaggcctttctgtggtcttcctttatccaggctttctgctctcagccttgccttccttttttctgggtctcctgggctgcccctttcacttgcaaaataaatctttggtttgtgcccctcttcccaaaaaaaaaaa

SEQ ID NO: 174 - DNA, 3840 bp, Homo sapiens
  misc_feature: Template ID: 234404.4
ctttcccgagtccgtttgaggaagtccccgaggcgcacagagcaagcccacgcgagggcacctctggaggggagcgcctgcaggaccttgtaaagtcaaaaatgtcagaaacttccaggaccgcctttggaggcagaagagcagttccacccaataactctaatgcagcggaagatgacctgcccacagtggagcttcagggcgtggtgccccggggcgtcaacctgcaagagtttcttaatgtcacgagcgttcacctgttcaaggagagatgggacactaacaaggtggaccaccacactgacaagtatgaaaacaacaagctgattgtccgcagagggcagtctttctatgtgcagattgacttcagtcgtccatatgaccccagaagggatctcttcagggtggaatacgtcattggtcgctacccacaggagaacaagggaacctacatcccagtgcctatagtctcagagttacaaagtggaaagtggggggccaagattgtcatgagagaggacaggtctgtgcggctgtccatccagtcttcccccaaatgtattgtggggaaattccgcatgtatgttgctgtctggactccctatggcgtacttcgaaccagtcgaaacccagaaacagacacgtacattctcttcaatccttggtgtgaagatgatgctgtgtatctggacaatgagaaagaaagagaagagtatgtcctgaatgacatcggggtaattttttatggagaggtcaatgacatcaagaccagaagctggagctatggtcagtttgaagatggcatcctggacacttgcctgtatgtgatggacagagcacaaatggacctctctggaagagggaatcccatcaaagtcagccgtgtggggtctgcaatggtgaatgccaaagatgacgaaggtgtcctcgttggatcctgggacaatatctatgcctatggcgtccccccatcggcctggactggaagcgttgacattctattggaataccggagctctgagaatccagtccggtatggccaatgctgggtttttgctggtgtctttaacacatttttacgatgccttggaataccagcaagaattgttaccaattatttctctgcccatgataatgatgccaatttgcaaatggacatcttcctggaagaagatgggaacgtgaattccaaactcaccaaggattcagtgtggaactaccactgctggaatgaagcatggatgacaaggcctgaccttcctgttggatttggaggctggcaagctgtggacagcaccccccaggaaaatagcgatggcatgtatcggtgtggccccgcctcggttcaagccatcaagcacggccatgtctgcttccaatttgatgcaccttttgtttttgcagaggtcaacagcgacctcatttacattacagctaagaaagatggcactcatgtggtggaaaatgtggatgccacccacattgggaaattaattgtgaccaaacaaattggaggagatggcatgatggatattactgatacttacaaattccaagaaggtcaagaagaagagagattggccctagaaactgccctgatgtacggagctaaaaagcccctcaacacagaaggtgtcatgaaatcaaggtccaacgttgacatggactttgaagtggaaaatgctgtgctgggaaaagacttcaagctctccatcaccttccggaacaacagccacaaccgttacaccatcacagcttatctctcagccaacatcaccttctacaccggggtcctgaaggcagaattcaagaaggagacgttcgacgtgacgctggagcccttgtccttcaagaaagaggcggtgctgatccaagccggcgagtacatgggtcagctgctggaacaagcgtccctgcacttctttgtcacagctcgcatcaatgagaccagggatgttctggccaagcaaaagtccaccgtgctaaccatccctgagatcatcatcaaggtccgtggcactcaggtagttggttctgacatgactgtgacagttcagtttaccaatcctttaaaagaaaccctgcgaaatgtctgggtacacctggatggtcctggagtaacaagaccaatgaagaagatgttccgtgaaatccggcccaactccaccgtgcagtgggaagaagtgtgccggccctgggtctctgggcatcggaagctgatagccagcatgagcagtgactccctgagacatgtgtatggcgagctggacgtgcagattcaaagacgaccttccatgtgaatgcacaggaagctgagatgaaccctggcatttggcctcttgtagtcttggctaaggaaattctaacgcaaaaatagctcttgctttgacttaggtgtgaagacccagacaggactgcagagggctccagagtggagatcccacatatttcaaaaacatgcttttccaaacccaggctattcggcaaggaagttagtttttaatctctccaccttccaaagagtgctaagcattagctttaattaagctctcatagctcataagagtaacagtcatcatttatcatcacaaatggctacatctccaaatatcagtgggctctcttaccagggagatttgctcaatacctggcctcatttaaaacaagacttcagattccccactcagccttttgggaataatagcacatgatttgggctctagaattccagtcccctttctcggggtcaggttctaccctccatgtgagaatatttttcccaggactagagcacaacataatttttatttttggcaaagccagaaaaagatctttcattttgcacctgcagccaagcaaatgcctgccaaattttagatttaccttgttagaagaggtggccccatattaacaaattgcatttgtgggaaacttaaccacctacaaggagataagaaagcaggtgcaacactcaagtctattgaataatgtagttttgtgatgcattttatagaatgtgtcacactgtggcctgatcagcaggagccaatatcccttactttaaccctttctgggatgcaatactaggaagtaaagtgaagaatttatctctttagttagtgattatatttcacccatctctcaggaatcatctcctttgcagaatgatgcaggttcaggtcccctttcagagatataataagcccaacaagttgaagaagctggcggatctagtgaccagatatatagaaggactgcagccactgattctctcttgtccttcacatcacccatgttgagacctcagcttggcactcaggtgctgaagggtaatatggactcagccttgcaaatagccagtgctagttctgacccaaccacagaggatgctgacatcatttgtattatgttccaaggctactacagagaaggctgcctgctatgtatttgcaaggctgatttatggtcagaatttccctctgatatgtctagggtgtgatttaggtcagtagactgtgattcttagcaaaaaatgaacagtgataagtatactgggggcaaaatcagaatggaatgctctggtctatataaccacatttctaagcctttgagactgttcctgagccttcagcactaacctatgagggtgagctggtcccctctatatatacatcatacttaactttactaagtaatctcacagcatttgccaagtctcccaatatccaattttaaaatgaaatgcattttgctagacagttaaactggcttaacttagtatattattattaattacaatgtaatagaagcttaaaataaagttaaactgattatatttgc

SEQ ID NO: 175 - DNA, 6372 bp, Homo sapiens
  misc_feature: Template ID: 474310.15
  unsure 529, 1912, 1919, 1925, 1927, 1931, 1933, 1935-1988: a, t, c, g, or other
gcctcccgcccgccgcctctgtctccctctctccacaaactgcccaggagtgagtagctgctttcggtccgccggacacaccggacagatagacgtgcggacggcccaccaccccagcccgccaactagtcagcctgcgcctggcgcctcccctctccaggtccatccgccatgtggcccctgtggcgcctcgtgtctctgctggccctgagccaggccctgccctttgagcagagaggcttctgggacttcaccctggacgatgggccattcatgatgaacgatgaggaagcttcgggcgctgacacctcaggcgtcctggacccggactctgtcacacccacctacagcgccatgtgtcctttcggctgccactgccacctgcgggtggttcagtgctccgacctgggtctgaagtctgtgcccaaagagatctcccctgacaccacgctgctggacctgcagaacaacgacatctccgagctccgcaaggatgacttcaagggtctccagcacctctacgtaaggngctgggaggaaccagcaggcctacagcagagggcaggggtccgggccctcgtcctggtgaacaacaagatctccaagatccatgagaaggccttcagcccactgcggaagctgcagaagctctacatctccaagaaccacctggtggagatcccgcccaacctacccagctccctggtggagctccgcatccacgacaaccgcatccgcaaggtgcccaagggagtgttcagcgggctccggaacatgaactgcatcgagatgggcgggaacccactggagaacagtggctttgaacctggagccttcgatggcctgaagctcaactacctgcgcatctcagaggccaagctgactggcatccccaaagacctccctgagaccctgaatgaactccacctagaccacaacaaaatccaggccatcgaactggaggacctgcttcgctactccaagctgtacaggctgggcctaggccacaaccagatcaggatgatcgagaacgggagcctgagcttcctgcccaccctccgggagctccacttggacaacaacaagttggccagggtgccctcagggctcccagacctcaagctcctccaggtggtctatctgcactccaacaacatcaccaaagtgggtgtcaacgacttctgtcccatgggcttcggggtgaagcgggcctactacaacggcatcagcctcttcaacaaccccgtgccctactgggaggtgcagccggccactttccgctgcgtcactgaccgcctggccatccagtttggcaactacaaaaagtagaggcagctgcagccaccgcggggcctcagtgggggtctctggggaacacagccagacatcctgatggggaggcagagccaggaagctaagccagggcccagctgcgtccaacccagccccccacctcaggtccctgaccccagctcgatgccccatcaccgcctctccctggctcccaagggtgcaggtgggcgcaaggcccggcccccatcacatgttcccttggcctcagagctgcccctgctctcccaccacagccacccagaggcaccccatgaagcttttttctcgttcactcccaaacccaagtgtccaaggctccagtcctaggagaacagtccctgggtcagcagccaggaggcggtccataagaatggggacagtgggctctgccagggctgccgcacctgtccagacacacatgttctgttcctcctcctcatgcatttccagcctttcaaccctccccgactctgcggctcccctcagcccccttgcaagttcatggcctgtccctcccagacccctgctccactggcccttcgaccagtcctcccttctgttctctctttccccgtccttnctctctntctctntntctntntnnnnnnnnnnnnnnnnnnnnnnnnnnnnnnnnnnnnnnnnnnnnnnnnnnnnnntgtgcttcctcagacctttctcgcttctgagcttggtggcctgttccctccatctctccgaacctggcttcgcctgtccctttcactccacaccctctggccttctgccttgagctgggactgctttctgtctgtccggcctgcacccagcccctgcccacaaaaccccagggacagcggtctccccagcctgccctgctcaggccttgcccccaaacctgtactgtcccggaggaggttgggaggtggaggcccagcatcccgcgcagatgacaccatcaaccgccagagtcccagacaccggttttcctagaagcccctcacccccactggcccactggtggctaggtctccccttatccttctggtccagcgcaaggaggggctgcttctgaggtcggtggctgtctttccttccggaagcgggccgacgacactgtgttcttcgacatcccaatcccgaccagcggcaaaggcctcttccggaaggtggacgtggatgaatatgacgaggacaagtttattttatttcagtgtttgctccttgcggttcagaagcacatctactgcctggttggaacccaaggcttttataaaaccgtagagaaatagagctctatgtatagagaaaatatacatgttgattaattgtgtgactctttcctgtgcaaagcagaaagttctaaatgcaacagcatgattctctccaagtccttccctgggatttggggggccctggaggctgtgatctcacctccaatagagaatccccaattcttccagcccaagggaggcccagtcatgtagaaagagcaggagataaagtcaaagctgacaactcatgggttccccaagcttcctccggggcaggggctatgtttgggggccttagccctgcaaagaaggggtagctggggtgccaaccttgttggttagtgaccagcactggcagctaaggctgttgggaagtctaggcattgcagcgggcaggctcatgggtagagcaggggtgtccagggctcttctcccctagaactggggtctgaagggtggtacctgggcataggaaggaaccaggacagggctggggacagaaggtggtcacagtcatggtttcactctcagaaatatcctgggcctatggcttaaggcttcgtggagcagggagtggaccttgtggttatttacaaggctgggccatataaaagcattgcaaacatggagtggagaggatccttggagatgagctggttcaatcactcctctgaccaacaaggaaacaaaggcccagagaggagaaggcagtgcctggccagacgtgggacctgaacccagccagggctctgactcccagtcccccagtcccctctctacctccttgtcttggctgagtctttttttgataaaggccccagacagcctctccgacagtctcaggtcaggctggggttataaatggagcagtggactcagagtcagaggcccagactctgctcttgggccttcacattacccagccttgctaataaccacgaggccactggtgtggagggggctgcctcctctctctaagcctcagtctccttatcctggaagcagcgcccacaacagtttcccatggtgattaaatgggttggaggccccgtgagccccagcaagtgtgggaggcacccagcacatagtaggtgcttcacaatggtgaggttgagggggagggctattaagcttgggctgctgggatgtggaggggaccttgggcctatcactgtccccacccagctctggctgtcccaagggcccctggagctgggtgcagtcatgggaagaggtacgggatgcagtctagggagctggattccctgatccagccaaggggcatgctgtcccttttttgcctgctccaaggagctatgaagtagatcaaacaatatggtgggtggtcaatggctttccaaagggcatctgggcaggagagggaatgtaggtctttcctctctcaccccagccccagtcagccaaggtcagggctcccactgtttctggcacagagcattcctcacagcaaagggggtgagtggggacccacaggctcaggaggctgagatgggccaggggcacattccatttccgagagcccccataggctgcccaccctgccctggggtctggggcccaagaaggggcatattttgctcactagcttgggataaggattgggatcaaggtgggggctctcagcaggctgggagcaggggtcccttaggcggggccaatgatgacattccggaagcccttcacagccttcagcttgtcgctctcgaagttcaccaccagcttgtggaggcccatgtggagcggcagcaggtccattctcaccttaacttcctcccctgcctccacggggtctgggatctccaccgtcttctgctcctcagtcaggccggccccctccacagtgaaggtgcagccttccagggccacagggagcgggttctgcagggacacctcagccaccagcttgcgtttctgcttgggctccccaaggatccggatcttgatttctggattctccaggtagaggtccctctcagccagcaggtagctgttgataactggctccacgaggagggcccgcaccttgatgaggttggactccgtaaggcagtcacggtatttctcatagaggatgcaaagaggaacgctcttctcagagaaaggctccaggttgaggttgagcaggtacttggtgccacactcgggccccaagatcccattgtagctgacggtgcgggcacagagcaggaggcggcagacgtactcctcagcggtgttgttggtgatgtgggcaaagacgtcaaagtcactgcccatgttcatgctctggcccacacggatccgcatggccatccctgtctcctccttctcggccagtttgttcaggtggttcgcccttgtgaaggcctccctctcctctgaggacccctctgggtatttgtaggtgtgggtgatatcctcccgctcgtctcggcccacgctcttagtgctgatcttcagcccaacgatcagggaacggttgatggatttgtgcacagacccatcgtcctgctggatccagtctaccacgtcggcattgacctccgcaaagacaaagggcgcatcgtacttggtgctcaggtcgccctccttgatggcacgaactggaactgggccacagcagtacgtcccttcgctcttctcctggggcgttgggtccagggcctgccagccctcgtaccccggctgcaggtccggcctggtcatccacgactccacccagcagtggaagttccagatcatctcgctcttgtcaccctggatctccccaaactcattgcggaagtactcgatgagaaggttgctgttctggtcatgggccgagttgtagttggtcacgacgcgggtagggatgcccaggcacctcagcactgtgcaggccacggcggcgaagacccagcactggccatacttgacgcgctggcagccgtggttcttccagcgccgcaggatgtccacgctgccgatccaggacatggggctgacgccgtccccgtagttgttgtcccagcgtcccagcagcacaccctggtcatcgttgcagttgaccatgccactcaccacccggcccacgtagacggggctgctgcggcgggagcagtcacggccggcgttcttcaggaacttggggttgacatctagaaggatcaggcagatgtctaggatcccatcttcaaactgcccaaaattccaaggtatgttcttgatgaacttggccgagccctggtagataaagccctgctgggtgaggacatactcctgccgctcctcttccgagtccaggtacacagcatccgctgggcaccaggcgttgaagagcaaaatgaagtggcccagcacaaagctggatccctggtagccagtggaggcctccaggctgaggcgatacaggccgatgggggcgttggccggggtggtgagctgcagcgagagggtgcagtcttgctggtccaccacggtggctgtccagtcaccctcctccacagcatctcttagtggaaaacgggccttggtcccggcctcctggctaggggctgggccggtcacgacactgaaggtgagactgtctacactggcctcgtagttgcggccctcaaagtgcagggtcagccagaagggctggccccgtcgcaccaccagcttctcccggcacaggtcggccgtgtggtggtctcggccattggtctccagctccagatcacacctctctaagaccagctcctcggccatggtcgggcgggggcggtggctccttccactggcagcgagaccctccaagtgcgaccaccgt

SEQ ID NO: 176 - DNA, 4595 bp, Homo sapiens
  misc_feature: Template ID: 254107.1
ggatccagctgtctctccttgcgatcctgtcttcggggaagtccacgtcctaggcaggtcctcccaaagtgcccttggtgccgatcacccctcccagcgtcttgcaggtcctgtgcaccacctcccccactccccattcaaagccctcttctctgaagtctccggttcccagagctcttgcaatccaggctttccttggaagtggctgtaacatgtatgaaaagaaagaaaggaggaccaagagatgaaagagggctgcacgcgtgggggcccgagtggtgggcggggacagtcgtcttgttacaggggtgctggccttccctggcgcctgcccctgtcggccccgcccgagaacctccctgcgccagggcagggtttactcatcccggcgaggtgatcccatgcgcgagggcgggcgcaagggcggccagagaacccagcaatccgagtatgcggcatcagcccttcccaccaggcacttccttccttttcccgaacgtccagggagggagggccgggcacttataaactcgagccctggccgatccgcatgtcagaggctgcctcgcaggggctgcgcgcagcggcaagaagtgtctgggctgggacggacaggagaggctgtcgccatcggcgtgcctgtgcccctctgctccggcacggccctgtcgcagtgcccgcgctttccccggcgcctgcacgcggcgcgcctgggtaacatgcttggggtcctggtccttggcgcgctggccctggccggcctggggttccccgcacccgcagagccgcagccgggtggcagccagtgcgtcgagcacgactgcttcgcgctctacccgggccccgcgaccttcctcaatgccagtcagatctgcgacggactgcggggccacctaatgacagtgcgctcctcggtggctgccgatgtcatttccttgctactgaacggcgacggcggcgttggccgccggcgcctctggatcggcctgcagctgccacccggctgcggcgaccccaagcgcctcgggcccctgcgcggcttccagtgggttacgggagacaacaacaccagctatagcaggtgggcacggctcgacctcaatggggctcccctctgcggcccgttgtgcgtcgctgtctccgctgctgaggccactgtgcccagcgagccgatctgggaggagcagcagtgcgaagtgaaggccgatggcttcctctgcgagttccacttcccagccacctgcaggccactggctgtggagcccggcgccgcggctgccgccgtctcgatcacctacggcaccccgttcgcggcccgcggagcggacttccaggcgctgccggtgggcagctccgccgcggtggctcccctcggcttacagctaatgtgcaccgcgccgcccggagcggtccaggggcactgggccagggaggcgccgggcgcttgggactgcagcgtggagaacggcggctgcgagcacgcgtgcaatgcgatccctggggctccccgctgccagtgcccagccggcgccgccctgcaggcagacgggcgctcctgcaccgcatccgcgacgcagtcctgcaacgacctctgcgagcacttctgcgttcccaaccccgaccagccgggctcctactcgtgcatgtgcgagaccggctaccggctggcggccgaccaacaccggtgcgaggacgtggatgactgcatactggagcccagtccgtgtccgcagcgctgtgtcaacacacagggtggcttcgagtgccactgctaccctaactacgacctggtggacggcgagtgtgtggagcccgtggacccgtgcttcagagccaactgcgagtaccagtgccagcccctgaaccaaactagctacctctgcgtctgcgccgagggcttcgcgcccattccccacgagccgcacaggtgccagatgttttgcaaccagactgcctgtccagccgactgcgaccccaacacccaggctagctgtgagtgccctgaaggctacatcctggacgacggtttcatctgcacggacatcgacgagtgcgaaaacggcggcttctgctccggggtgtgccacaacctccccggtaccttcgagtgcatctgcgggcccgactcggcccttgcccgccacattggcaccgactgtgactccggcaaggtggacggtggcgacagcggctctggcgagcccccgcccagcccgacgcccggctccaccttgactcctccggccgtggggctcgtgcattcgggcttgctcataggcatctccatcgcgagcctgtgcctggtggtggcgcttttggcgctcctctgccacctgcgcaagaagcagggcgccgccagggccaagatggagtacaagtgcgcggccccttccaaggaggtagtgctgcagcacgtgcggaccgagcggacgccgcagagactctgagcggcctccgtccaggagcctggctccgtccaggagcctgtgcctcctcacccccagctttgctaccaaagcaccttagctggcattacagctggagaagaccctccccgcaccccccaagctgttttcttctattccatggctaactggcgagggggtgattagagggaggagaatgagcctcggcctcttccgtgacgtcactggaccactgggcaatgatggcaattttgtaacgaagacacagactgcgatttgtcccaggtcctcactaccgggcgcaggagggtgagcgttattggtcggcagccttctgggcagaccttgacctcgtgggctagggatgactaaaatatttattttttttaagtatttaggtttttgtttgtttcctttgttcttacctgtatgtctccagtatccactttgcacagctctccggtctctctctctctacaaactcccacttgtcatgtgacaggtaaactatcttggtgaatttttttttcctagccctctcacatttatgaagcaagccccacttattccccattcttcctagttttctcctcccaggaactgggccaactcacctgagtcaccctacctgtgcctgaccctacttcttttgctcttagctgtctgctcagacagaacccctacatgaaacagaaacaaaaacactaaaaataaaaatggccatttgctttttcaccagatttgctaatttatcctgaaatttcagattcccagagcaaaataattttaaacaaaggttgagatgtaaaaggtgttaaattgatgttgctggactgtcatagaaattacacccaaagaggtatttatctttacttttaaacagtgagcctgaattttgttgctgttttgatttgtactgaaaaatggtaattgttgctaatcttcttatgcaatttccttttttgttattattacttatttttgacagtgttgaaaatgttcagaaggttgctctagattgagagaagagacaaacacctcccaggagacagttcaagaaagcttcaaactgcatgattcatgccaattagcaattgactgtcactgttccttgtcactggtagaccaaaataaaaccagctctactggtcttgtggaattgggagcttgggaatggatcctggaggatgcccaattagggcctagccttaatcaggtcctcagagaatttctaccatttcagagaggccttttggaatgtggcccctgaacaagaattggaagctgccctgcccatgggagctggttagaaatgcagaatcctaggctccaccccatccagttcatgagaatctatatttaacaagatctgcagggggtgtgtctgctcagtaatttgaggacaaccattccagactgcttccaattttctggaatacatgaaatatagatcagttataagtagcaggccaagtcaggcccttattttcaagaaactgaggaattttctttgtgtagctttgctctttggtagaaaaggctaggtacacagctctagacactgccacacagggtctgcaaggtctttggttcagctaagctaggaatgaaatcctgcttcagtgtatggaaataaatgtatcatagaaatgtaacttttgtaagacaaaggttttcctcttctattttgtaaactcaaaatatttgtacatagttatttatttattggagataatctagaacacaggcaaaatccttgcttatgacatcacttgtacaaaataaacaaataacaatgtgctctcgggttgtgtgtctgttcacttttcctccctcagtgccctcattttatgtcattaaatggggctcacaaaccatgcaaatgctatgagatgcatggagggctgccctgtaccccagcacttgtgttgtctggtgatggcaccatctctgattttcaaagctttttccagaggctattattttcactgtagaatgatttcatgctatctctgtgtgcacaaatatttattttctttctgtaaccataacaacttcatatatgaggacttgtgtctctgtgcttttaaatgcataaatgcattataggatcatttgttggaatgaattaaataaacccttcctggggcatctggcgaatcccagctg

SEQ ID NO: 177 - DNA, 1168 bp, Homo sapiens
  misc_feature: Template ID: 218156.2
aagaaagccaactttcctttcaaatacacaccccaacccgccccggcatacacagaaatggggactgcgagcagaagcaacatcgctcgccatctgcaaaccaatctcattctattttgtgtcggtgctgtgggcgcctgtactctctctgtcacacaaccgtggtacctagaagtggactacactcatgaggccgtcaccataaagtgtaccttctccgcaaccggatgcccttctgagcaaccaacatgcctgtggtttcgctacggtgctcaccagcctgagaacctgtgcttggacgggtgcaaaagtgaggcagacaagttcacagtgagggaggccctcaaagaaaaccaagtttccctcactgtaaacagagtgacttcaaatgacagtgcaatttacatctgtggaatagcattccccagtgtgccggaagcgagagctaaacagacaggaggagggaccacactggtggtaagagaaattaagctgctcagcaaggaactgcggagcttcctgacagctcttgtatcactgctctctgtctatgtgaccggtgtgtgcgtggccttcatactcctctccaaatcaaaatccaaccctctaagaaacaaagaaataaaagaagactcacaaaagaagaagagtgctcggcgtatttttcaggaaattgctcaagaactataccataagagacatgtggaaacaaatcagcaatctgagaaagataacaacacttatgaaaacagaagagtactttccaactatgaaaggccatagaaacgttttaattttcaatgaagtcactgaaaatccaactccaggagctatggcagtgttaatgaacatatatcatcaggtcttaaaaaaaaataaaggtaaactgaaaagacaactggctacaaagaaggatgccagaatgtaaggaaactataactaatagtcattaccaaaatactaaaacccaacaaaatgcaactgaaaaataccttccaaatttgccaagaaaaaaaattctattttaaacttgtatcctgagtctgtttcattcaacatgagatgtgtgatgactgccatcctgaagatctgaagccaaaccatgtgcctcagtcttgagtggaagaatcacctttatggtttgtggaaatcatggcacaattaaaat

SEQ ID NO: 178 - DNA, 4026 bp, Homo sapiens
  misc_feature: Template ID: 350788.2
  unsure 22, 79, 97: a, t, c, g, or other
gctgagtgtgcaagaggaagcnaagaaggctctgagggcctgtgagccataatgactgatttcacccatgagccaattnccagaggcaacagaaganccagtgcaccaaccaggctgggtccctccgccagagggtgtcaccattctaagctgaaagtgtttggggagatcagacattgctgtctggtgctcctctctcagtggccatcatgtctttgacatctgcttaccagcataaattagcagagaagctcactatcctgaatgatcgcggtcagggggttctcatccgtatgtataacatcaagaagacttgttcagaccccaaatctaagccacctttcttactggaaaagtccatggaaccatctctcaagtatatcaacaagaaatttcccaacatagatgtccgaaacagcacgcaacatttaggaccagtacatcgtgaaaaagccgagataattagattcctcaccaactactaccagtcatttgtggatgtcatggaatttcgggatcatgtatatgaacttctcaacaccattgatgcctgccagtgccattttgatatcaatctcaactttgatttcactcggagttacctggacttgattgtaacttacacctcagtcattttacttctgtcacggattgaagatcggcggatactcattggcatgtacaattgtgcccatgagatgctgcatgggcatggtgaccccagttttgcccgtctgggtcagatggtcttggagtatgaccaccctctgaagaagctgacagaagagtttgggcctcacacaaaggctgtgagtggagccctcctctctttgcatttcctctttgtccgaagaaaccagggggctgagcagtggcgcagtgcccaacttctaagcctcatcagcaaccccccagccatgattaaccctgctaattcagatacaatggcctgtgagtatctgtctgtggaagtaatggagcgctggattatcattgggtttcttctttgtcatgggtgcctcaactccaatagccagtgccagaagctgtggaagctgtgtctgcagggctccctgtacatcacccttatccgtgaggatgtgctgcaggtgcacaaagtcaccgaggacctgtttagcagtttgaaagggtatggcaagagagtggcagacagtaaagggagagcaaggaacatgtaattgcaaacagtggccagtttcattgtcaacggcggcaatttctgcggatggcagtgaaggagctggagactgtgttggctgatgaaccgggactactgggtcctaaggctctttttgctttcatggccctgtccttcattcgtgatgaggtcacctggctggttcgccacacagagaatgtcaccaagacaaagacacctgaggactatgctgactcgagcattgcagagctacttttcttgttggaggggattaggtctctggtccgaagacacatcaaagtgatacagcaataccaccttcagtacttggcaagatttgatgctcttgtgctcagtgacatcattcagaacttgtctgtgtgtccagaggaggagtccatcatcatgtcctcattcgtcagtatcctctcctctctgaatctcaaacaagttgataatggagaaaaatttgaattctcaggattgaggctggactggttccgcctacaggcatacactagcgtggctaaggcccctctgcacctgcatgagaaccctgacttagccaaggtgatgaacctcattgtcttccactcccgaatgctggactccgtagaaaaattgctggtggaaacttctgatctgtctactttctgctttcatcttcgtatctttgagaagatgtttgccatgaccttggaggaatctgccatgttgcgttatgccattgctttccccctgatttgtgctcactttgtccactgcactcatgagatgtgcccagaggagtacccccacctcaagaaccatggtcttcaccactgcaactccttcctggaagagttggccaagcagaccagcaattgcgtcctggagatctgtgctgagcagcgaaacctgagcgagcagcttctacctaagcactgtgccactacaatcagcaaagccaagaacaagaaaaccaggaagcagaggcagactcccagaaaaggagagcccgagagggacaagccaggagctgagagtcaccggaagaaccgcagcattgtcaccaacatggacaagctacacctaaacttgacagaactggcactgacaatgaatcatgtatacagtttctccgtgtttgaacatactatcttcccttctgagtacctcagcagccacctggaggccagactcaacagagccattgtgtggctggctggctacaatgccacgacccaggagatcgtacggccttctgagctgttggcaggagtcaaagcatacattggtttcatacagtcactggcccagtttttgggtgcagatgcttccagagtcatccgcaacgccctcctgcagcagacacaaccactggattcctgtggggaacagacaatcaccacactctacacaaactggtacctggaaagtctgcttagacaggcaagcagtgggaccatcatcctctccccagccatgcaggccttcgtcagcctgcccagagaaggggagcagaacttcagtgcagaggagttctctgacatctctgagatgcgggccttggcagaactcctgggcccctatggcatgaagttcctgagtgaaaacctgatgtggcatgtgacctctcagattgtggagctgaagaagctggtggtggaaaacatggacatacttgttcagatcagatccaactttagcaagccggacttgatggcttccctgctgccccagctgacaggggctgaaaatgtgctaaagcgcatgaccatcattggggttatcctcagtttcagggccatggcccaagagggacttcgggaggttttctcctcccactgcccatttcttatgggtcccattgagtgcttgaaggagtttgtcactccagacacagacatcaaggtgaccttgagtatctttgagctggcatctgctgcaggtgtgggctgtgacattgacccagccttggtggctgccattgctaatctgaaagctgatacttcatctcctgaggaggaatataaggtggcctgcctgctcttgatctttctggcagtttccctcccactccttgccactgacccttcttccttttatagcattgagaaggatggttacaacaacaatattcattgcttgaccaaagccatcatccaggtgtctgctgccctcttcacgctctacaacaagaacattgaaactcacctcaaggaatttctggtggtggcctctgtcagcctcttgcagctgggccaggagactgacaagcttaaaaccagaaatcgagaatccatttctctgctcatgcgcttggtggtggaggagtcatccttcctgaccctggacatgctggagtcctgtttcccttatgtcctgcttcgaaatgcctatcgggaggtgtctcgggccttccacctaaactgaatgcctgccagtacccactgaagagccctttggaccttcctaaacccttgccatagtggaagctgtggtcactttcgcagggggtgggaatggggtggggtcactaaggagagagggtcaggagccagagttgatgagcagatctgtggaagaacaatccagggctgagaaatcgtagagcagtgaggcaggctgggagcatggaggacagcttatggaaaaagttagggcgtggggccacatgtgtgaattttacaatgaaaaaaggagtaacgtacaagtatattttctatcttctggtgacttgagcttgagctctgacaggcatgggcctctccgaccttcatcactattcttaggataatgctggcgggcagagatgatcaatcatcatattaaatcataatgagcttataatcctcccactggaa

SEQ ID NO: 179 - DNA, 525 bp, Homo sapiens
  misc_feature: Template ID: 899239.5
caccctgcctcctctgcctcctggttcaaaagcagctaaaccaaaagaagcctccagacagccctgagatcacctaaaaagctgctaccaagacagccacgaagatcctaccaaaatgaagcgcttcctcttcctcctactcaccatcagcctcctggttatggtacagatacaaactggactctcaggacaaaacgacaccagccaaaccagcagcccctcagcatccagcaacataagcggaggcattttccttttcttcgtggccaatgccataatccacctcttctgcttcagttgaggtgacacgtctcagccttagccctgtgccccctgaaacagctgccaccatcactcgcaagagaatcccctccatctttgggaggggttgatgccagacatcaccaggttgtagaagttgacaggcagtgccatgggggcaacagccaaaataggggggtaatgatgtaggggccaagcagtgcccagctgggggtcaataaagttacccttgtacttgcaaaa

SEQ ID NO: 180 - DNA, 1595 bp, Homo sapiens
  misc_feature: Template ID: 382906.6
ctgggcttcctgtcgtcacagcatgatcatattttttcacccttcacttctccttttacacaaatagccccggatatctgtgttaccagccttgtctcggccacctcaaggataatcactaaattctgccgaaaggactgaggaacggtgcctggaaaagggcaagaatatcacggcatggggcatgagtagcttgaaactgctgaagtatgtcctgtttttcttcaacttgctcttttggatctgtggctgctgcattttgggctttgggatctacctgctgatccacaacaacttcggagtgctcttccataacctcccctccctcacgctgggcaatgtgtttgtcatcgtgggctctattatcatggtagttgccttcctgggctgcatgggctctatcaaggaaaacaagtgtctgcttatgtcgttcttcatcctgctgctgattatcctccttgctgaggtgaccttggccatcctgctctttgtatatgaacagaagctgaatgagtatgtggctaagggtctgaccgacagcatccaccgttaccactcagacaatagcaccaaggcagcgtgggactccatccagtcatttctgcagtgttgtggtataaatggcacgagtgattggaccagtggcccaccagcatcttgcccctcagatcgaaaagtggagggttgctatgcgaaagcaagactgtggtttcattccaatttcctgtatatcggaatcatcaccatctgtgtatgtgtgattgaggtgttggggatgtcctttgcactgaccctgaactgccagattgacaaaaccagccagaccatagggctatgatctgcagtagttctgtggtgaagagacttgtttcatctccggaaatgcaaaaccatttatagcatgaagccctacatgatcactgcaggatgatcctcctcccatcctttccctttttaggtccctgtcttatacaaccagagaagtgggtgttggccaggcacatcccatctcaggcagcaagacaatctttcactcactgacggcagcagccatgtctctcaaagtggtgaaactaatatctgagcatcttttagacaagagaggcaaagacaaactggatttaatggcccaacatcaaagggtgaacccaggatatgaatttttgcatcttcccattgtcgaattagtctccagcctctaaataatgcccagtcttctccccaaagtcaagcaagagactagttgaagggagttctggggccaggctcactggaccattgtcacaaccctctgtttctctttgactaagtgccctggctacaggaattacacagttctctttctccaaagggcaagatctcatttcaatttctttattagagggccttattgatgtgttctaagtctttccagaaaaaaactatccagtgatttatatcctgatttcaaccagtcacttagctgataatcacagtaagaagacttctggtattatctctctatcagataagattttgttaatgtactattttactcttcaataaataaaacagtttattatctcaatcacaacattcctatatatcaaacactc

SEQ ID NO: 181 - DNA, 505 bp, Homo sapiens
  misc_feature: Template ID: 382906.16
  unsure 484: a, t, c, g, or other
gaagaaacatccaaggtggtcttgaaggacactgggatcctgtaacacagccccggatatctgtgttaccagccttgtctcggccacctcaaggataatcactaaattctgccaaaaggactgaggaacggtgcctggaaaagggcaagaatatcacggcatgggcatgagtagcttgaaactgctgaagtatgtcctgtttttcttcaacttgctcttttgggtgttggggatgtcctttgcactgaccctgaactgccagattgacaaaaccagccagaccatagggctatgatctgcagtagttctgtggtgaagagacttgtttcatctccggaaatgcaaaaccatttatagcatgaagccctacatgatcactgcaggatgatcctcctcccatcctttccctttttaggtccctgtcttatacaacccagagaagtgggtgttggccaggcacatccccatctcaggcagcaagacnatctttcactcactgacggca

SEQ ID NO: 182 - DNA, 948 bp, Homo sapiens
  misc_feature: Template ID: 269837.15
  unsure 926, 929, 933-934, 943: a, t, c, g, or other
gtcgaaggtcacggcgcgctcacaatggagctctgcggagtctgtgcagaaaggcttccagatgctggcggatccccgctccttcgactccaacgccttcacgcttctcctccgggcggcattccagagtctgctggacgcccaggcggacgaggccgtgttagatcatccagacttgaaacatatcgacccagtggttttaaaacattgtcatgcagcagctgcaacttacatactagaggcaggaaagcaccgagctgacaagtcaactctaagcacttatctagaagactgtaaatttgacagagagcgaatagaactgttttgcacggaatatcagaataataagaattccctagaaatcctactgggaagtataggcagatctctccctcatataacggatgtttcttggcgcttggaatatcagataaagaccaatcaacttcataggatgtacagacctgcatatttggtgaccttaagtgtacagaacactgattccccatcctatccagagattagttttagttgcagcatggaacaattacaggacttggtggggaaacttaaagatgcttcgaaaagcctggaaagagcaactcagttgtaacttggggaagttaacgatccgcccgagtgcagaggaaaaccagaaacgccttgccttcagctgaaccaccgtttgtgcgagctggatgtccttttcagtagaaaagaattttccttttgaatttataccattcatcaattttgacactttaaaaacgtgtgaaagggttaagagggaaagatactgcccaagtatttgaatcgtttagtagtaactgtccatttatcctattttgatctttttcaagtcttctgaaaggaagtagacagtattacaccctgaataaataaggtgttgttttcccacaaaaaanaanaaanngggcggccnccgat

SEQ ID NO: 183 - DNA, 2836 bp, Homo sapiens
  misc_feature: Template ID: 241016.6
ctctgttgcggtccgcttcggtttctgttgcgggacccggggtgtctcctagcgcaaccggaactagccttctgggggccggcttcctttatctctggcggccttgtagtcgtctccgagactccccacccctccttccctcttgaccccctaggtttgattgccctttccccgaaacaactatcatgagcgcgaggctgccggtgttgtctccacctcggtggccgcggctgttgctgctgtcgctgctcctgctgggggcggttcctggcccgcgccggagcggcgctttctacctgcccggcctggcgcccgtcaacttctgcgacgaagaaaaaaagagcgacgagtgcaaggccgaaatagaactatttgtgaacagacttgattcagtggaatcagttcttccttatgaatacacagcgtttgatttttgccaagcatcagaaggaaagcgcccatctgaaaatcttggtcaggtactattcggggaaagaattgaaccttcaccatataagtttacgtttaataagaaggagacctgtaagcttgtttgtacaaaaacataccatacagagaaagctgaagacaaacaaaagttagaattcttgaaaaaaagcatgttattgaattatcaacatcactggattgtggataatatgcctgtaacgtggtgttacgatgttgaagatggtcagaggttctgtaatcctggatttcctattggctgttacattacagataaaggccatgcaaaagatgcctgtgttattagttcagatttccatgaaagagatacattttacatcttcaaccatgttgacatcaaaatatactatcatgttgttgaaactgggtccatgggagcaagattagtggctgctaaacttgaaccgaaaagcttcaaacatacccatatagataaaccagactgctcagggccccccatggacataagtaacaaggcttctggggagataaaaattgcctatacttactctgttagcttcgaggaagatgataagatcagatgggcgtctagatgggactatattctggagtctatgcctcatacccacattcagtggtttagcattatgaattccctggtcattgttctcttcttatctggaatggtagctatgattatgttacggacactgcacaaagatattgctagatataatcagatggactctacggaagatgcccaggaagaatttggctggaaacttgttcatggtgatatattccgtcctccaagaaaagggatgctgctatcagtctttctaggatccgggacacagattttaattatgacctttgtgactctatttttcgcttgcctgggatttttgtcacctgccaaccgaggagcgctgatgacgtgtgctgtggtcctgtgggtgctgctgggcacccctgcaggctatgttgctgccagattctataagtcctttggaggtgagaagtggaaaacaaatgttttattaacatcatttctttgtcctgggattgtatttgctgacttctttataatgaatctgatcctctggggagaaggatcttcagcagctattccttttgggacactggttgccatattggccctttggttctgcatatctgtgcctctgacgtttattggtgcatactttggttttaagaagaatgccattgaacacccagttcgaaccaatcagattccacgtcagattcctgaacagtcgttctacacgaagcccttgcctggtattatcatgggagggattttgccctttggctgcatctttatacaacttttcttcattctgaatagtatttggtcacaccagatgtattacatgtttggcttcctatttctggtgtttatcattttggttattacctgttctgaagcaactatacttctttgctatttccacctatgtgcagaggattatcattggcaatggcgttcattccttacgagtggctttactgcagtttatttcttaatctatgcagtacactacttcttttcaaaactgcagatcacgggaacagcaagcacaattctgtactttggttataccatgataatggttttgatcttctttctttttacaggaacaattggcttctttgcatgcttttggtttgttaccaaaatatacagtgtggtgaaggttgactgaagaagtccagtgtgtccagttaaaacagaaataaattaaactcttcatcaacaaagacctgtttttgtgactgccttgagttttatcagaattattggcctagtaatccttcagaaacaccgtaattctaaataaacctcttcccatacacctttcccccataagatgtgtcttcaacactataaagcatttgtattgtgatttgattaagtatatatttggttgttctcaatgaagagcaaatttaaatattatgtgcatttgtaaatacagtagctataaaattttccatacttctaatggcagaatagaggaggccatattaaataatactgatgaaaggcaggacactgcattgtaaataggattttctaggctcggtaggcagaaagaattatttttctttgaaggaaataactttttatcatggtaattttgaaggatgattcctatgatgtgttcaccaggggaatgtggcttttaaagaaaatcttctattggttgtaactgttcatatcttcttacttttctgtgttgacttcattattcccatggtattggccttttaaactatgtgcctctgagtctttcaatttataaatttgttatcttaataaatattataaaaatgtcttcattgcatcattacctattatata

SEQ ID NO: 184 - DNA, 506 bp, Homo sapiens
  misc_feature: Template ID: 005486.4
tcagacatataatggttacatagtaaacactggtaactttttaaaagtcacatgtgtattcagtacttgaaagttaaggttgttgggaatatggtggttaatagcacagttgaacataatggaagaattcactaccttagaatgatcagtttctgttttgatacatttcgtaccaaaatttcttctacaactcatcaattattcttcgttgtttgtttcacaccattctcgaaatctcacatactcttttctcaaattcagggagtcatgttcttgttttattcacagagggctggtttttaagtttggccgcactgaagacttatggcagtgaacacatctgatttcccacagcacaacagccctgcatgggtttgtttgtttttttactgctcactcccaaccttttgtaatgccattttctaaacttatttctgagtgtagtctcagcttaaagttgtgtaatactaaaatcacgagaacacctaaacaacaaccaaaaatct

SEQ ID NO: 185 - DNA, 483 bp, Homo sapiens
  misc_feature: Template ID: 977953.8
cccccgtccccgactccgccaggccgccccccgcggtggccaagaggcctcctgtgccccccaagaggcaagagaacccagggcaccccggcggagcaggaggcggggagcaagatttcatgtcagacctcatgaaagctttgcaaaagaagagaggcaacgtgtcctagggacgggcatgatgagtgttccagagggagaagcatcgctgaccccgagcgcaggttttgctagcagattgccctgacatcttgttcatttcagataaaatgtgatgggaaacttctcactgatgtgctcaagtacaggcataaccattaacccagtagagttcagaatatctgcccaaatgtacatatcgttcccatgtattttaacctaaatggaatgtatcttcccttccaagctgcctaaagcgctgttttaggttcatttattttattatgttcagaagcatcaaataaaagttaaacgtttttccgg

SEQ ID NO: 186 - DNA, 723 bp, Homo sapiens
  misc_feature: Template ID: 404923.1
  unsure 31, 33, 315, 320, 331: a, t, c, g, or other
attgagctaacagacaacatagttattaccntngaatctgggcgtccagaccaaatgatcctggagaagtctctcgattatggacgaacatggcagccctatcagtattatgccacagactgcttagatgcttttcacatggatcctaaatccgtgaaggatttatcacagcatacggtcttagaaatcatttgcacagaagagtactcaacagggtatacaacaaatagcaaaataatccactttgaaatcaaagacaggttcgcgttttttgctggacctcggctacggaatatggcttccctctacggacanctggntacaaccaagnaactcagaggtttctttacagtcacagacctgaggataaggctgttaagaccagccgttggggaaatatttgtagatgagctacacttggcacgctacttttacgcgatctcagacataaagggtgcgaggaaggtaagagaaaatctgtctgccttcaatgggaacgggtgtgtccaaagaaaatgccagagtgtctcacagctgtaaaagtgacatttgtcaatttctactgcaacgttttcttcaggaactccactgtagaagtaggttctgaaggcattctgagatcccctcatcctcagcagtcatattgtaatcccaaacttgctgtccctgaacctggcatgattcttcagaatttaaataaaagtgaattttaaaaagtaaaaa

SEQ ID NO: 187 - DNA, 1676 bp, Homo sapiens
  misc_feature: Template ID: 449028.32
tgcctgtcgccatgttttcaggccgggtctggcttggtcttcccccgtaaggaaatggccggggagctccagggacccaggcgccgtcgcttcggcggagcctggggctgaccagccaggacagcggggtaaacccgaacaattctgcgcgaggtagggaggccatggcgtccggcagtaactggctctccggggtgaatgtcgtgctggtgatggcctacgggagcctggtgtttgtactgctatttatttttgtgaagaggcaaatcatgcgctttgcaatgaaatctcgaaggggacctcatgtccctgtgggacacaatgcccccaaggacttgaaagaggagattgatattcgactctccagggttcaggatatcaagtatgagccccagctccttgcagatgatgatgctagactactacaactggaaacccagggaaatcaaagttgctacaactatctgtataggatgaaagctctggatgccattcgtacctctgagatcccatttcattctgaaggccggcatccccgttccttaatgggcaagaatttccgctcctacctgctggatctgcgaaacactagtacgcctttcaagggtgtacgcaaagcactcattgatacccttttggatggctatgaaacagcccgctatgggacaggggtctttggccagaatgagtacctacgctatcaggaggccctgagtgagctggccactgcggttaaagcacgaattgggagctctcagcgacatcaccagtcagcagccaaagacctaactcagtcccctgaggtctccccaacaaccatccaggtgacatacctcccctccagtcagaagagtaaacgtgccaagcacttccttgaattgaagagctttaaggataactataacacattggagagtactctgtgacggagctgaaggactcttgccgtagattaagccagtcagttgcaatgtgcaagacaggctgcttgccgggccgccctcggaacatctggcccagcaggcccagactgtatccatccaagttcccgttgtatccagagttcttagagcttgtgtctaaagggtaattccccaacccttccttatgagcatttttagaacattggctaagactattttcccccagtagcgcttttttctggatttgcattcaggtgttattcttaatgtttctgtcaaagcttcttaaaaatcttcacttggtttcagccatagttcaccttccctgttccaggtttatttaattccaaaggtgagagttggagtgagatgtcttccatatctatacctttgtgcacagttgaatgggaactgtttgggtttagggcatcttagagttgattgatggaaaaagcagacaggaactggtgggaggtcaagtggggaagttggtgaatgtggaataacttacctttgtgctccacttaaaccagatgtgttgcagctttcctgacatgcaaggatctactttaattccacactctcattaataaattgaataaaagggaatgttttggcacctgatataatctgccaggctatgtgacagtaggaaggaatggtttcccctaacaagcccaatgcactggtctgactttataaattatttaataaaatgaactattatcaaataaaacgtatgaatcagtcctt

SEQ ID NO: 188 - DNA, 5060 bp, Homo sapiens
  misc_feature: Template ID: 330864.4
atttgagaaggagaagttggccctggcccatgacactgccctgagcatgaaatccaagaaagtcagccccaaggaaaagcagttggaatatttggaattggctaagacctatttggagtgcaaagagccaacactgtcccttaagtgtctgagctatgccaaggagttccagctctctgcccagctgtgcgagaggctgggaaagataagagatgctgcctatttctataagcgaagccagtgctacaaagacgctttcagatgctttgagcagattcaggaatttgatctagcactcaaaatgtactgccaagaggagctttttgaagaagctgctattgcagtggaaaagtatgaagaaatgctaaagactaagacccttcccatttccaagctctcctattctgccagtcagttttacttggaagctgcagcaaagtatctgagtgcaaataagatgaaggaaatgatggctgtcctctcaaagctagacatagaagaccagctggtgttcttgaagtctcggaaacgcttagcagaagctgcagacctgctgaacagggaaggtaggagagaagaggctgccctgctgatgaagcaacatggctgcctcctggaggctgccaggctcactgccgacaaggacttccaggcctcatgtctgctgggggccgcccgcctcaatgtggccagggattccgacatagaacacaccaaggacattctgagagaagcacttgatatctgctatcaaactggccagttgtctggcattgcggaggcccacttcctgcaaggggtaatcctgagagactttcagaagctcagggatgccttcttcaagtttgacacgctcaaccactcagctggagtggtggaagcactctacgaagcagccagccagtgtgaggccgagcctgagaagattctgggcctggctccagggggcttggaaatcctcctcagtctggtcagggctctcaaaagagtgaccaacaatgctgagaaggaaatggtcaaatcttgctttgagttttttgggatttcccaggtggatgccaagtattgccagatagctcagaatgaccctgggcccatattaagaataatttttgacctggatttgaacttgagagagaaaaaaacaaaagatcattttttgataatgactgaccaagtgaaattagccctaaacaaacaccttttgggcaggctgtgtcagatcacacggagcctgcttgggaagacctaccgaggagtctgcatgaggtttattgtaggcttaaaatgtgaggatgaaaactgtgaacattttcacaggcctctgcggcgttgtgaagccaagtgtttagttcagtcgaaaatgaacttggtggcaatcaacgggttgcttttggaagccaaaaaagtattccctaaaatcttagcagaagaacttaaagaaattgattatattttgtctacagatatgtatggcctttgcaagtccattctggatgtccttttccctaagcatttccatcagagagtgttgtcagaaaaccccatggcatgcaaagaaatcctcaaaccaaattacaaatccttccggttctacagatttgctttgaaggagtacatccactttctgtttgaaaatgaaagcgcacgcaaccgccgggaatccacagacctgtggctgagtgccatgcaagctttccttctctcttccaactacccggaggagtttgaaaagctgctccaccaggaggaggacaactacaacagggaactcaaagctctagagtctgaaaaggatgaaaggggcagggggagaggcagcaggataaaaggaatagaagggaaatttggcatgctggcacccaacagggatgatgaaaatatggacaagacccacctgtgcttcatccggcttctggagaattgcattgatcaattctacgtgtacaggaacccagaagactacaagaggctctttttccgtttcatgaatgtcctcatcaagaggtgcaaagaaccactcatccccagcattggaaacacagtagccctcctggagttccagttcatccactgtggggtggtgctggcccgcctctggaagaatgtcattctatgcctccccaagagctacattgcactcttgcactactgggagttcctgtttagcaagaaggacaaggagcttggggatgtgttctccatcattcaggaatacaaacccaaggacgtgacaagagccattcaggatttccggttccatctctcctacctcgccaaggtgctatgtggctatgagaatgtgaacttcaacgtcctgcttgatgccttcagtgaaatagactatgtggtctcgggtgaggctgagcggacactggtgctgtgcttggtgatgctagtgaatgctgaggagatcctgcagccatactgcaagcctctcctgtatcgccacttccgggagattgagtcaaggctgcagctcatgagcatggactgccctggccaggttcccgagaggctcctgaaggtggtgaagcgggtcttggtggcagtcaatgtgaagtctgtggctgaggcactgcaggacctgctctttgagcgggatgaagagtacctaatggactgtgactggcggtgggaccctgtgcacaccaaagggtccatagtccgtggcctctattatgaggaggtcagactaaaccgcctgctctgtttggaccctgtggactactttgctgaacctgagtgtgagtttggccaggatgagatggatgaactggcattagaagaccgagaccacgtcctggccaccattctttcccaaaagcaacggaaggcctccatacagcggaagttgaggagggcatgcctggtggtgtctctgtgcatcagttggaggagaagagtgggcacccagatggagcgtgtcagggaggaggccagggagcccagggctgggaacttcaaaaaggcagacgtggacaggacccagtgtgacctatgtggagtgaagtttacccgtggcccagagaactatttcagccccagcaaagcgtttgagggggcagcttccgaggtggcagtcctttccagggctgagctggaaagggaggagtgtcaggagaggaacagcgagtcttacgagcagcatatccatctagaacaccaccagaggcagcaagtggcctaccagaaatactcagaatttttccacgagaaggtggacccggccattgatgaaggcaagctggtggtgcaggacatcgagcaaagtgtatggatccacagtcacgtgggctccaaggagcacagccacatgctgcagaaggtccaggagcacatcaagagggtttcggatatggtggaggacctctacaggcggaaggcctgggctggcgcggaggaggcgatgactcggctggtcaacattctgatcctgtcagtcagggatgcacgagactggttgatgaaaacagagacccgcttaaagaaggaaggtattgttcaggaagatgattatgaaaatgaagttgaagactttggtgagcttcggcctagaaggcgttctcggaaatgtggaaagcagagaaaatactaatgtccacacagctgcagcctcctcatccttcggaacattccattctgacttagaattctgagcgctggggcagaagacaaaaagaatgtgaattagcattttaaaaataggggagtctaacaacaccattgctttttattctcattacttctctttcagtggcttaggatctgattgctccctcacctctaaagtgtttccaagtagagtctggcagtattagtttcccccacaaacaaattcaggtagagaagttgtagtcgaagggaatgttgggactcctcactgcatggtccctggggtgtctggctcatccccatcatgacgtgagttggtagcagaggactaggtgttaggacagactctcctcacctcagttgctgctgctctgggccaggaaatctctctatggattccctcatctcctgccacactgctgcagcatcaagtgtgctatgagagctgtatgtgcccaggggtgggccctgccactggccaccccgagcccaggacgcattctggtcatctctgagcccacttgtagtgtagcttcttctgttagagatgttagccttttctctctgtggcgacttttctgccttcccttcttctgttttttgtgatcattcttagctacctgtgccaagtcacagttagactacctcagaatgtagtcaagaattcacccagtgttctttggatgtcccttccctagggggaaaggctggggaatgttgctgggagcattcccagctgcctctccaaagtggtcctaactctgccttggctatggtgcagacattccaaaaagtgttttgtatacagccctgtacatctagttttcttggttctccctggcaagttcgctaccctagcttaggctgacgttctgatgagtctctgcttgctgagctcatcactgtgggatggtgacctgcagagctgcagattggagcaagtggacagaggagggagccagctaagccaaatccgtcactgccacttggctggcaggccttataagagggcggatctgggcccgtttgcaggaggccattgcctaccctctccccacagtgagccagcagccatcagctgatcccacctgggaaaccttcatgcctctctgatggttactgcccacccttaccccacccctcagctcagcctggtatggaaagcaaggtgcacgttggtctttgattgttctgtcctcacagcagagccagctttccccccatgttgctgctgcttttgctgctcatgctgcttgttgttttctcttccttatctttccaaattgtttccttgaaatgcttgtttccaatttttcttagattatgtttctaatttttattccaggtgtttttttttcttacttgacagaaaaaaagaaaaccccaacaatatcttgctgtattatcacattttttataaagttaaagcatttctcttacatgct

SEQ ID NO: 189 - DNA, 1019 bp, Homo sapiens
  misc_feature: Template ID: 039903.4
cctttttttttttttttaattgtataaaatttaaattttatgatcatgtctggacctttttacacttaacacaatggaaatgttcatattcatttttttccccaaaggaaaaatttctgaatcatcactatgttgcacagtagaatagaaatatgaattcaggtacttagtcaagtttctaaagaatgcaaataacagacatgatttaacttccaaaatctgaagtcatcaacatgattttgtagtactctatctcaggttttacctaaaaattcgttattattcagataaagatagctccctaatcacatgtttttaaaaagcctctgccccacgacaacttcctgagatctgtgaagaaactgcagtcttgtgatcagactccatataggactggcagttttgtaatcgtagggaaaaaacggtgactgattttacgtgtcaatcagttgtagtctgctgatctgattagaagccttgacaaatgcctggtggcgattgcaaataactgccaagcatatagggatgatacagtagcccactgttttgggatcagctcttgtacaagagtataggaacaaaaacatctgtaagtaaggtaccagaaaaataactgtccacacccaaaaaggcaaggagagtaattgagctttcaaggagtgtgtccatgtggttccttcaaggggctcctcagggtgctgttgaatgtgttccaaggccagcctgttgtaagtctcactgatttcaaaaacatagtaaaatgctgctgcactggctaacagatacaatcccactccaatccatcccatccgctgacggaagttcatcattctccatgctctgtgcaatggtcccgaaaatcttcctgttcccacggcaagcgttaaagagtcactcagctctgaataatcgggtggctttggcatttcagagaaagccaacataaaataaatcccctgggtcacccggctaggagaaaggtgagcgccgccagcctggagcaccagctactagtgatt

SEQ ID NO: 190 - DNA, 2002 bp, Homo sapiens
  misc_feature: Template ID: 250445.3
  unsure 1509, 1517: a, t, c, g, or other
ctagactctcgtagccacaccgttctccgatacgagcctttccggtgctatgccccggaagcggaagtgcgatcttcgggctgtcagagttggtctgttactcggtggtggcggagtctacggaagccgttttcgcttcacttttcctgggctgtagagcgctttccccctggcgggtgagagtgcagagacgaaggtgcgagatgagcactatgttcgcggacactctcctcatcgtttttatctctgtgtgcacggctctgctcgcagaggggcataacctgggtcctggtttacaggacagacaagtacaagagactgaaggcagaagtggaaaaacagagtaaaaaattggaaaagaagaaggaaacaataacagagtcagctggtcgacaacagaaaaagaaaatagagagacaagaagagaaactgaagaataacaacagagatctatcaatggttcgaatgaaatccatgtttgctattggcttttgttttactgccctaatgggaatgttcaattccatatttgatggtagagtggtggcaaagcttccttttacccctctttcttacatccaaggactgtctcatcgaaatctgctgggagatgacaccacagactgttccttcattttcctgtatattctctgtactatgtcgattcgacagaacattcagaagattctcggccttgccccttcacgagccgccaccaagcaggcaggtggatttcttggcccaccacctccttctgggaagttctcttgaactcaagaactctttattttctatcattctttctagacacacacacatcagactggcaactgttttgtagcaagagccataggtagccttactacttgggcctctttctagttttgaattatttctaagccttttgggtatgattagagtgaaaatggcagccagcaaacttgatagtgcttttggtcctagatgatttttatcaaataagtggattgattagttaagttcaggtaatgtttatgtaatgaaaaacaaatagcatccttcttgtttcatttacataagtattttctgtgggaccgactctcaaggcactgtgtatgccctgcaagttggctgtctatgagcatttagagatttagaagaaaaatttagtttgtttaacccttgtaactgtttgttttgttgttgtttttttttcaagccaaatacatgacataagatcaataaagaggccaaatttttagctgttttatgtacaaggagagatctgtttcattttgttttgccgtatttctagatataagttttagcatgggccaggaaggactaaaataaaagtttttaaggtactgtactttttgccatacttgactcatatactcaaaatacagagttgtcttggtgtaggaattggaaagcaagagtggaaaggaacgtaataactcgttggagtttaaaaatgagggtcttggcaagtaacactgatgtctgaaaaaaaattaaatataaatnaataaatnaaaatgagggtcctcagctgttctcttcatatcctattacagtctctcagattcttgtgggggcactcttagatctcccttggagacaaggttatagttatatgttgttaatctcgcagagcttccttttagtcacaatagccttcattttctgccatgccccttcataagggagaaggatgtttgtaccatgatcctccccgcataatctatggaattaggagtcctgtgtggagtcttatcaataaatatgcacattcatcaaatgtctacttaaatgtgagtattctaccagtgagaaaaaacacataattttcaaggtaatcattgttaaaccaacagcaaacttttgtctttttcagcgccataaagtccagaagacagtagaaaagtatcttcaaagtgctgaggaaaataagtatcaacttagaattttatgtacaatattggaggcaaaataaagacatgtttagacatacaaaaaa

SEQ ID NO: 191 - DNA, 1494 bp, Homo sapiens
  misc_feature: Template ID: 400961.22
  unsure 1363-1384: a, t, c, g, or other
gacttccgcttccggggccgccgccatcgctctcccgggcttagaaggcccggctactgacgcgcagtgccagaccttagccctcacggtccttaagtctcggtcgccctcgcctcgcagcctgccacccgcgctcagctgcccgcctcctcagccagccatgctggagcatctgagctcgctgcccacgcagatggattacaagggccagaagctagctgaacagatgtttcagggaattattcttttttctgcatctctagatagttggatttatctacgggtacgtggctgaacagttcgggtggactgtctatatagttatggccggatttgctttttcatgtttgctgacacttcctccatggcccatctatcgccggcatcctctcaagtggttacctgttcaagaatcaagcacagacgacaagaaaccaggggaaagaaaaattaagaggcatgctaaaaataattgaggttttcatgattcagcacctgcttttgtttctgtgagatgagctaaattgctttcataccccagataagagctaaaaccacctaatgctcttatggcacagctgtgtatagatttagttctctttatacttcatttctagcccagttgggttttgatttatataagtagtttagaccttctcttcataatcttgctctgagatggggaacagaacacacaagtatgaagtttctttcaggtgtaaataatgaaaaataaatgcctcataaatgatagtacaatgtaactatcaaagttttttttttgcactatgaggtttaattggaaacattaaaatggttaactcataatgaattataaaactttgatagttacattgtactatcatttatgaggcatttatttttcattatttacacctgaaagaaacttcatacttgtgtgttctgttccccatctcagagcaagattatgaagagaaggtctaaactacttatataaatcaaaacccaactgggctagaaatgaagtataaagagaactaaatctatacacagctgtgccataagagcattaggtggttttagctcttatctggggtatgaaagcaatttagctcatctcacagaaacaaaagcaggtgctgaatcatgaaaacctcaattatttttagcatgcctcttaatttttctttcccctggtttcttgtcgtctgtgcttgattcttgaacaggtaaccacttgagaggatgccggcgatagatgggccatggaggaagtgtcagctgggccagaaaagaggaaatgcataaattatagctattaaaagtttaaaaaatcattacgtataatgccaggttcccaaatgactcctatgctgagggnnnnnnnnnnnnnnnnnnnnnntccatattcctataaaggctctgtgccaccatccatgcaaaatactgtatgatgatgggaacaggctcactgcctatacaaatggctttaagacctaaaagaaaggtggg

SEQ ID NO: 192 - DNA, 3425 bp, Homo sapiens
  misc_feature: Template ID: 977835.14
ggcggcggcggctgtggaggccgcagtccgggtcctggcttcggcctcagccccaccatggtgacgcttgctgaactgctggtgctcctggccgctctcctggccacggtctcgggctatttcgttagcatcgacgcccatgctgaagagtgcttctttgagcgggtcacctcgggcaccaagatgggcctcatcttcgaggtggcggagggcggcttcctggacatcgacgtggagattacaggaccagataacaaaggaatttacaaaggagacagagaatccagtgggaaatacacatttgctgctcacatggatggaacatacaaattttgttttagtaaccggatgtccaccatgactccaaaaatagtgatgttcaccattgatattggggaggctccaaaaggacaagatatggaaacagaagctcaccagaacaagctagaagaaatgatcaatgagctagcagtggcgatgacagctgtaaagcacgaacaggaatacatggaagtccgggagagaatacacagagccatcaacgacaacacaaacagcagagtggtcctttggtccttctttgaagctcttgttctagttgccatgacattgggacagatctactacctgaagagattttttgaagtccggagagttgtttaaaaagcctcttcctgatgatcccaactcagaattcactgtttaccaaacaccttggtcataataatgtcattagtttctccatttttattttctgaactgtacattcacaacttatgtttctttgagattaatagatattgggggaaaaacgcctttttaggaaaattatagtgaaaatttgacagttgattggcataatttcttgtttgaatgctgcctccattatataggtccttccaggaactcaaacactgtaagtgaaatatgggagtatagtttttattatttcttcttttccttttgttttcataatataatgcagtttgttcaggaaatcagcacaaagcctgatagtactttactaaaatgactgcattctttggattccttcagtctatggttcaagtcactaaagattcatttttgttgagtccttatgagaaacagcagtatgaatcttgacggtttctgcccgtcctaatggcagagctctctgacttgggtgtatgctgccaggctgggtactttcatactttgttttcttgttttgctttaaaactacgactcagcatacattttcccacatacatttttacattgtaccttaggactcagtcatctccacttaaattgatgacacaagcagctaataaccatttctgggtttctgcctaaccccctaattgtctgttaaagccaattctctgggtgtcccagtgagtggtggctttttttctttccacattggcacattcacttctcccactcttggcatgtaagaaataagcatttacataattggaaaaatctggatttctgatgccaaagggttaaagcttcttggatttcatttcattgatatacagccactattttatttttgatcagtggcctttgggccactgttcagggtactgaccatcagtgtcagcattagggttttggtttttgtttcttttgggtatttcttttttggcacatgtgaatcttgttttgtgtaaaatgaaattactttctcttgttctctgatgatgggtttaaaattaaaagagcatccggttttggtatggggatgatccaggattatgttgtgactgatacatattagttacttgtgcttttttttttttttggatctttgcaagggcaaaactacaagtaacgagttttatataattaatttaaatttgttacaggttttcatgttcaggataaaccatacttccaccttgggtgagaacacttgcaacagtttattaatgaggtgactttcaccttaggacaactgttgcatgccaagttttttgtgtgtgtgaaacacttcaaaactgatttaaaagatgtaaatttaaaattggttgtatctaatatgccccaggttcggtaaataaacaattctttttaaaaacagtattctgtgttttatatattgacagctaatccacattttttacacaccaactttctgttcttatttgacatgagacatgttcatgttttctgagtatttatacctattacgtctgttactttttaattctataaacttgaggatagtgaatggtaccaagttttagtttctgcataggttttccagtgtggcttctctgatggatcagtgctaaaatcttaagtatttttctatttgggaaaaaagggttgaattattttcacttgcccacgtagtttatgaatgtgggaaatagcttcaaagacagattaaatgatttgcccaaggccacagaaaagagtgaaaggtggaaccggagactagatcaccacctgtagaaactgttcttcctctgtgaaactaacggcctgctggtaataaaagtagcggggcatcaactccagctggattattttggagcctgcaaatctattcctacttgtacggactttgaagtgattcagtttcctctacggatgagagactggctcaagaatatcctcatgcagctttatgaagccaactctgaacacgctggttatctaaatgagaagcagagaaataaagtcaagaaaatttacctggatgaaaagaggcttttggctggggaccatcccattgaccttctcttaagggactttaagaaaaactaccacatgtatgtgtatcctgtgcactggcagtttagtgaacttgaccaacaccctatggatagagtcttgacacattctgaacttgctcctctgcgagcatctctggtgcccatggaacactgcataacccgtttctttgaggagtgtgaccccaacaaggataagcacatcaccctgaaggagtggggccactgctttggaattaaagaagaggacatagatgaaaatctcttgttttgaacgaagattttaaagaactcaactttccagcatcctcctctgttctaaccacttcagaaatatatgcagctgtgatacttgtagatttatatttagcaaaatgttagcatgtatgacaagacaatgagagtaattgcttgacaacaacctatgcaccaggtatttaacattaactttggaaacaaaaatgtacaattaagtaaagtcaacatatgcaaaatactgtacattgtgaacagaagtttaattcatagtaatttcactctctgcattgacttataattaatgattaaactattaatgataaaaataatgcatttgtattgttcataatatcatgtgcactttcaagaaaatggaatgctactcttttgtggtttacgtgtattattttcaatatcttaataccctaaataaag

SEQ ID NO: 193 - DNA, 4273 bp, Homo sapiens
  misc_feature: Template ID: 252920.1
gggaaagcgaggagccgcggcggcgtggagccggcgggcccgggcgggggctccccggagccctaccaccccaccctgggcatctacgcccgctgcatccggaacccaggggtgcagcacttccagcgggacacgctgtgcgggccctacgccgagagcttcggcgagatcgccagcggcttctggcaggccacagctattttcctggctgtgggaatctttattctctgcatggtggccttggtgtccgtcttcaccatgtgtgtacagagcatcatgaagaaaagcatcttcaatgtctgtgggctgttgcaaggaattgcaggtctattccttatcctcggtttgatactctaccctgctggctggggttgccagaaggccatagactactgtggacattatgcatctgcctacaaacctggagactgctccttgggctgggccttttataccgccattgggggcacagtcctcactttcatctgtgctgtcttctctgcacaagcagaaattgcaacctctagtgacaaagtacaggaagaaattgaagaggggaaaaatctgatctgcctcctttagtttggaagagacaatgccattttctcccttgagtaatcttgtgaaacagtccacagtttcatcatttgagtcaagtggagaactaacctttacctaccaaagccacgttccacggcccgaggcttaaacaggaccaatgagaggccacatccagctacgcaaagttactggacatgcggtctgcagtgcacattataaggaatggaacatgaaaatagtatataatcctagacctggagttgccaagttctgtcagactccatctcccccaggttcaatgatggataataatctaaatcattagggcagcagtttctctggtaacggaagagaccgtccgccagatctgcaggctgtttctgctccaacactgcttgcttgtgagcatctctgtgctctacaaagggggttttgggttggagttcttgttttcctctgttctttcaagttgtctccaacgaacagaaaactataaacttactggggacaggatgtgtgctaaagggcacagcaagacactgtcttttgcttagctgaccaaaggggtccagcagggatggcgtggagtcatgctgtggaacttattctaggctgaatcctagggtaaggtggatcaactgaactgtcactccagagattttagaaatttgagtaaagaaacaataaggacctatacaatcatatgagaacaaaaatatgaaatcttgctagtgaagacgtattttttcttcttcccagcagccaggctagcaccagttctggcccagtctcctcttcttctggagatcacatgtttttcttctaaggttaggattgtgctttgactgcgaaaggaaacctcactgtttcctccttccagggactgagggtctccaagctagctgtggcttatgcagatgttcactgggaggacctgccagaatctcggcacttggggggagacctttactcccagtttggtgaccatgctgtagtcagctctatttccaatcccgacagtagcagaatggcattctacaacaaaaagaagctagttatgggagttaagtttttgtagttactggtgttgatcctgaaagcagactgagataacattaaattgctgcaactgaagaactgcagccaagaccttaattccaggaaagcacagaggacaaagttaattcaaaaagaggcgctagatcaaggtcacagcactgcctacacctgtttacaaaaagaatcaaataccactatgaataaggattcaggggtttttaatctactttccataaattaccaatatcactgattcaggaagatagtatctcagaatgaccagagcagcacagaaacaagctactctgacattatgggagcttcaaaattgtatcatgatacagaaacactccttagcactttaagaaagtgagatggaactgccagatttctggaaggagaaaaagtgtaggtatttgggttcattaatctgctcacttgaggactttgttttgaaaaagtaccttctgtggacaaggtattgtgctaccagctatacaaccctgacttcagagtttgcaaccttgccctgagtgaatcatgttaaagctgtctgagtctaaagcaccgtatcttggtgcagaacagataattatagagagatggaatgggacaaccgcagttttactacattctggtgtttggcctatatgagaaaccatcttctcacagattaagggctaagggcaaaaggggtgggaggtgtggaactagccttaatgagtttcccattcctgaaccaaaattcaaagtgagtgagatgtaaatcctgtgattttggtgaagaaaaaaacgggtatcttcatagcagcctaggaaaccttaaccatatctctaacaccacacagaaagaggctggaggagccactggacaaagcttctgtctctgtgtgtacatttataatgttctaaccaagtctcaaaccttgatgaaaaacacaaaatttttccataaacttatcagaagactcacttttctttctttcttggatagagaaaccattttctgacactaggtttacaatctcagtgtccttacaagttaagtcctaagctcacaggatcctccgagcatgtccatcacctgctctttggctaaggtggcagtgtacctctagatcaacctgggaacagtcacaagggagtgtgacttcttggccataataaactcactcgatagtgtttatgttattaatctgaatgcaacagaagacaaaagcacaggcatgcacacacacagaaccccaaaccactaaaaactacctaaacactgacttagtaaatagtaaaaaggtaatgttgggacttttaaaccttgaatccattagccaggcttgggatgaaaggaccatctaaaatcatgctagtctaaaccatgctcttccacacagctgtttaaaaaccactgggtatgaggaatatgctagaaagaaatgttaaaaatagattgttggctcacacttatttttctaataaataggaccattattactaccaggaaagtcttatttattttgcctgaaattggcttaaagaaagtctcatgacgggatgggatgggctgcgcttctcaatgaactctgaggcagaaatatttgccttggattctgtggattctttaaacctgtgtgctaataattcaaacaatgttgcattaattgtataagggtttttgtatagttttcaaacatctgtggtgtaatgatctttgttaaacatatattctgtaaagtgccatagtctttttttatgtgtagcatatttaaaaatatatatgtatattatacatacacaagtttgtgtgaaagatgtgcaataacaaaggtgtatgtatgttttgttgttttgttttggaaactggacaggagtcaaaacagggatgtttgtttctgttttggcaaaggagagttccacatttttgccttcatggcttattcagtaacccataattttaatgctacacaaatcttatgtgaagaaaagactggtatgaaatcattttttcctgggtctaaaataatcgctagtgttatgtcaaagttaagcccgcacgccaggcccagttaatgctagtctttcatgtgaaatgtgaagctgccatgttgccttttctcttagtaggataactagtagctggtacataatcactgaggagctatttcttaacatgcttttatagaccatgctaatgctagaccagtatttaagggctaatctcacacctccttagctgtaagagtctggcttagaacagacctctctgtgcaataacttgtggccactggaaatccctgggccggcatttgtattggggttgcaatgactcccaagggccaaaagagttaaaggcacgactgggatttcttctgagactgtggtgaaactccttccaaggctgagggggtcagtaggtgctctggagggactcggcaccacttgatattcaacagccacttgagccaaatataaaattgtatttacagctgatggactcaatttgagccttcaaacttgtagttatcctattatattgtaaactaatacattgtctagcattgatttggttcctgtgcatatgtattttcactatgtgctcccctccccagatcttaattaaaccagattttgcaattcaaaaaataaaaaaaagggc

SEQ ID NO: 194 - DNA, 2716 bp, Homo sapiens
  misc_feature: Template ID: 343863.10
  unsure 1482: a, t, c, g, or other
gttttaccagaagcatatgaaagtggacaaaaccaagggggttcccttgaactttttagtcctgtttgtcctaaaacagaaaatagccgcattcacataaactctgataaaggtcttgaagaacatacaggatctcaagaacttttcagttctgaagatgaactgccaccaaatgagatacgtattgagttgtgtagctcaggaatactgtgttcccaactaaataccttccacaaaagtgctattaaaagaagctgtacctctgaagataaagtgggccagtctgaagctctatctagagtccttcaagtagctaagaaaatgaagttgatttctaatggaggagattctgctgtagaaatggatcggagaaatgtgtctgaatttaagagtattaaaaaaacatcattaataaaaaactgtgattctaaaagccagaagtataattgtttagtcatggtgctatctccatgccatgtgaaggaaataaacataaaattcggaccaaattctggctctaaagtgcctttagcaacagttacagtaattgatcaatcagaaactaagaagaaggtttttctgtggaggactgcagcattttgggcatttacagtgtttcttggagatataattttactcacagatgttgttattcatgaggaccaatggattggcgagacagtactacaatcaacatttagcagtcagttattaaatcttgggagttattcatctattcagcctgaagaatattccagtgtagtttgtgaagttgtacttcaagacttactggcatatgtgtcctcaaaacattcctacctcagagatcttcctccgaggcagcctcagagggtgaacagtatagactttgtagaattggagcaccttcaacctgatgtattagtccacgcagtactaagagttgttgatttcactatactgacagaggcagtatacagttatagaggacagaagcagaaaaaagttatgttaacagtggaacaggcccaagatcaacattatgcgcttgtattatggggtcctggagcagcctggtaccctcaacttcaaaggaaaaaaggttatatttgggaatttaaatatctttttgttcagtgcaattacacactagaaaacctagaattgcatacaacgccttggtcatcctgtgagtgcttgtttgatgatgatataagggcaattacatttaaagcaaaatttcaaaaaagtgcaccctcctttgtgaagatatcagacttagcaacccacctagaggataagtgttcaggagtggttctgattaaagcccagatttcagagctggcatttcctattacagcatctcagaagatagcgctaaatgctcacagttctctgaagagtattttttcttctcttcccaacatcgtatatactggctgtgcaaaatgtggattgggactagaaacagtgagaacaagatcttacaaacaatgttttagntgcttgccatttactatgaagaaaatatattataggccagcgttaatgactgccattgatgggagacatgatgtttgtatccgtgtagaatcaaagctgatagagaagattcttctcaacatttctgcagactgcctcaacagagtgaatagttcccttcctcagaagatcaccctatgggaatgggccgtgggcagacctggttcccactcccttgttggcagtcaagccgcagaaaccttgtgtattaaagattcagagcccttttttgtgtttaagatgaaaacagcttatccattacaacaagatttctccctcctggatttttatcctgacatggtaaagcatggagccaatgcccgtctctgaggccagaggaagaaattgcaggcatttcaaggaagaagtactgaaatgatttgtcttttgaaataaatgaatgacagggcttttgctttggattttttatgaaatatattttataaagagaattgcactagatatataaattaaaacttttttctaagaaaatcctgtgaggtttaaaaagattgtttttgtcttttggtttcttcctttctcctggagaaatgatctaccagtcaaggcaatatgtagcagatccctgggaattaaaggtttgcccatttgttcactgtatttagtccctgctacattccaggcattgtactaagtatggggaaccacagagaagacattccctcagaaactgctgcagtgctttcgcttatccctacctaaaaaaccgtcaatgtgaaatcatttccttgattataactataatgataatggattagtttatataaacctatgtttagacaagttcaagacaagcgtgtctttctataaaaagtattgaaaatgaaggaaatgagatcatgtttcaatttattaaagcagggaagagcattctgtggttagttcgtgtctaggatttgagtgccttactgaatgcatttaccagcaaacatgtagcaatctgttctctcattgtgattgtggaagaagctcatgtaaaatgatagtcattaatgaggaagtatggcgtggtacttattctgtaagttcagagtatgctgagtgttaatagattatcatattgcctgaaaataaattcagtaaggcacttcaaatcctagacacgaactaagcacagaacgctcttccctgctttaataaattgaaacatgatctcatttccttcattttcaat

SEQ ID NO: 195 - DNA, 1050 bp, Homo sapiens
  misc_feature: Template ID: 254547.9
agggtggctgcgtgtttccggaagacgtggcggctctcgcctggggctgtttcccggcttcatttctcccgactcagcttcccaccctgggctttccgaggtgctttcgccgctgtccccaccactgcagccatgatctccttaacggacacgcagaaaattggaatgggattaacaggatttggagtgtttttcctgttctttggaatgattctcttttttgacaaagcactactggctattggaaatgttttatttgtagccggcttggcttttgtaattggtttagaaagaacattcagattcttcttccaaaaacataaaatgaaagctacaggtttttttctgggtggtgtatttgtagtccttattggttggcctttgataggcatgatcttcgaaatttatggattttttctcttgttcaggggcttctttcctgtcgttgttggctttattagaagagtgccagtccttggatccctcctaaatttacctggaattagatcatttgtagataaagttggagaaagcaacaatatggtataacaacaagtgaatttgaagactcatttaaaatattgtgttatttataaagtcatttgaagaatattcagcacaaaattaaattacatgaaatagcttgtaatgttctttacaggagtttaaaacgtatagcctacaaagtaccagcagcaaattagcaaagaagcagtgaaaacaggcttctactcaagtgaactaagaagaagtcagcaagcaaactgagagaggtgaaatccatgttaatgatgcttaagaaactcttgaaggctatttgtgttgtttttccacaatgtgcgaaactcagccatccttagagaactgtggtgcctgtttcttttctttttattttgaaggctcaggagcatccataggcatttgctttttagaaatgtccactgcaatggcaaaaatatttccagttgcactgtatctctggaagtgatgcatgaattcgattggattgtgtcattataaagtattagaacctagcaacttaggtctgac

SEQ ID NO: 196 - DNA, 2310 bp, Homo sapiens
  misc_feature: Template ID: 277726.11
cgagctcgctgtggcccggatgttcggtgcagctgccagatccgctgatctagtgcttctcggaaaaaaccttcagggcggcccatggctgtcgatattcaaccagcatgccttggactttattgtgggaagaccctattatttaaaaatggctcaactgaaatatatggagaatgtggggtatgcccaagaggacagagaacgaatgcacagaaatattgtcagccttgcacagaatctcctgaactttatgattggctctatcttggatttatggcaatgcttcctctggttttacattggttcttcattgaatggtactcggggaaaaagagttccagcgcacttttccaacacatcactgcattatttgaatgcagcatggcagctattatcaccttacttgtgagtgatccagttggtgttctttatattcgttcatgtcgagtattgatgctttctgactggtacacgatgctttacaacccaagtccagattacgttaccacagtacactgtactcatgaagccgtctacccactatataccattgtatttatctattacgcattctgcttggtattaatgatgctgctccgacctcttctggtgaagaagattgcatgtgggttagggaaatctgatcgatttaaaagtatttatgctgcactttacttcttcccaattttaaccgtgcttcaggcagttggtggaggccttttatattacgccttcccatacattatattagtgttatctttggttactctggctgtgtacatgtctgcttctgaaatagagaactgctatgatcttctggtcagaaagaaaagacttattgttctcttcagccactggttacttcatgcctatggaataatctccatttccagagtggataaacttgagcaagatttgccccttttggctttggtacctacaccagcccttttttacttgttcactgcaaaatttaccgaaccttcaaggatactctcagaaggagccaatggacactgagtgtagacatgtgaaatgccaaaaacctgagaagtgctcctaataaaaaagtaaatcaatcttaacagtgtatgagaactattctatcatatatgggaacaagattgtcagtatatcttaatgtttgggtttgtctttgttttgtttatggttagacttacagacttggaaaatgcaaaactctgtaatactctgttacacagggtaatattatctgctacactggaaggccgctaggaagcccttgcttctctcaacagttcagctgttctttagggcaaaatcatgtttctgtgtacctagcaatgtgttcccattttattaagaaaagctttaacacgtgtaatctgcagtccttaacagtggcgtaattgtacgtacctgttgtgtttcagtttgtttttcacctataatgaattgtaaaaacaaacatacttgtggggtctgatagcaaacatagaaatgatgtatattgttttttgttatctatttattttcatcaatacagtattttgatgtattgcaaaaatagataataatttatataacaggttttctgtttatagattggttcaagatttgtttggattattgttcctgtaaagaaaacaataataaaaagcttacctacataaaatttcaatgttttgacacttaattgttgtttggcacaatagtatggaagtaattcaaactggtaaatagtttcctctcatatctcgggtatatatacataccatattttattgatccagagatacttatttcactttgtgacatctctgaattaggatgcatcttacaactgatggcttattaggtttaatgaaatacagaagatacacagtataaaaagggttttcctgtggttggtttgtggtttgtgataggtgttctgtgatgtttatgctttgaaggccttaagactcatggttgcaaccatggaagcaaaatgaaatttttagctcttaacctaacaacctgaccatgtttatccatttttattgtttagaagtttatttactgatacttggtggaggttgtgtgaattagttaaattttaaatgtttaagacttctattaacagctgcaaaatatgaaagtaagtgcactcacttttcctgtagtagtctgtcttttgaattcacagcagttgtatccttgagttactttgttaatgtatttttctcagtacatttaaccactgggaaatgaacccttgtacgaatgtgtttcttcttctctgtaggaataaaaaataaatataaaaattttatttgtattgcacac

SEQ ID NO: 197 - DNA, 660 bp, Homo sapiens
  misc_feature: Template ID: 246177.4
gccaggcgaagaaactacaactcccagggcgtcccggagcaggccaacgggactacgggaagcagcgggcagcggcccgcgggaggcacctcggagatctgggtgcaaaagcccagggttaggaaccgtaggcatgctgcgccccaaggctttgacccaggtgctaagccaagccaacactggaggcgtccagagcaccctgctgctgaataacgagggatcactgctggcctactctggttacggggacactgacgcccgggtcaccgctgccatagccagtaacatctgggccgcctacgaccggaacgggaaccaagcgtttaatgaagacaatctcaaattcatcctcatggactgcatggagggccgtgtagccatcacccgagtggccaaccttctgctgtgtatgtatgccaaggagaccgtgggctttggaatgctcaaggccaaggcccaggctttggtgcagtacctggaggagcccctcacccaagtggcggcatcttaacggcattggtggaagctggggtcagaaaagagaaatgaccatttggaggggcggggcctcctagaagaaccttcttagacaatggggggaggatgggactttgttttttccaagaataaacttcaactcctgtaaaaaaaaaaaaaagg

SEQ ID NO: 198 - DNA, 604 bp, Homo sapiens
  misc_feature: Template ID: 410012.21
gacttttctagctgtatgactgttacttaaactatctaaaatagagcattttggtatctttcatctgaccatccatatccaatgttctcatttaaacattacccagcatcattgtttataatcagaaactctggtccttctgtctggtggcacttagagtcttttgtgccataatgcagcagtatggagggaggattttatggagaaatggggatagtcttcatgaccacaaataaataaaggaaaactaagctgcactgtgggttttgaaaaggttattatacttcttaacaattctttttttcagggacttttctagctgtatgactgttacttgaccttctttgaaaagcattcccaaaatgctctattttagatagtttaacattaaccaacataattttttttagatcgagtcagcataaatttctaagtcagcctctagtcgtggttcatctctttcacctgcattttatttggtgtttgtctgaagaaaggaaagaggaaagcaaatacgaattgtactatttgtaccaaatctttgggattcattggcaaataatttcagtgtggtgtattattaaatagaaaaaaaaaattttgt

SEQ ID NO: 199 - DNA, 1259 bp, Homo sapiens
  misc_feature: Template ID: 410012.24
  unsure 144, 166, 171, 313, 316, 318-319, 341-384: a, t, c, g, or other
cactggtgctgaggtctggggactcaagaggacacctacgcgtctgcaaggtatcactcactcctgagggtagccccttcaggttgggatccatagagagcagcgggacaaaaggcagttcctaggctggatgcccggcttctnacaggcacgtcgtaaacctggngtctnaaagttctggcaggaacaagcaggtactaattataacctgtacagcctgttaacagtcgaccttggactccaaggaggtgaaggttctggggagaaggtctcaagggtcctctggatatctcagatataagacaggaggtangcngnntgcagtggctcacgcctttaannnnnnnnnnnnnnnnnnnnnnnnnnnnnnnnnnnnnnnnnnnnagagcactgttttttttaatggccttgcactcttcttatggacctttgctgccctcagttgaccaaacatgacatcagaaacagatacatttgtgtgttttaaaaacagctcctaatactggaacaaaaatatttaactgtcttgacaatactcatgagtatctgcatgggcgacttcagagttgagtttaatcaaagagtttattcttaggtcctagtagaagagctaacctcacactcatcccattctaaactatgtgattcaacactgattttacatccaacaaagtgaaatcttgatagttgggtgtaaaaaggagagtaatggagatttcagagtagttggggttgcttacttttcatttttaattctttaggttttgtaagttacacacttcaagcattatagatgatcctctttttactactgaactaatgaagcctttttcattgcattgttctgcatttatttctacagggagaaaactggttgtcctggatgtttgaaaagttggtcgttgtcatggtgtgttacttcatcctatctatcattaactccatggcacaaagttatgccaaacgaatccagcagcggttgaactcagaggagaaaactaaataagtagagaaagttttaaactgcagaaattggagtggatgggttctgccttaaattgggaggactccaagccgggaaggaaaattcccttttccaacctgtatcaatttttacaacttttttcctgaaagcagtttagtccatactttgcactgacatactttttccttctgtgctaaggtaaggtatccaccctcgatgcaatccaccttgtgttttcttagggtggaatgtgatgttcagcagcaaacttgca

SEQ ID NO: 200 - DNA, 4787 bp, Homo sapiens
  misc_feature: Template ID: 410012.20
aaccatagaacatgggaataggttttattttcatctcaagaacatttaagttgggtgaagaaattcagcttttgttgttagaatctgacaggcttcaaacacttgtgatggaggggttgttgtcatatcaaagtccacctagtaaagttttaggtgaccagtgactttgtcaattaggtctgctggtcctggcccaatccctaggacagtttgagagcctggtgcaatctgagtacgtccagcatcttgaattaaacttacagtcagtcccagcatttttgcatgggccaataatgcaatcagggtttcttcatcaggagctttgaccaccaccttgggctggccacagtattcccattgtttgagcatttcaggatttcttctttgaatctgcttgtaggctgaaacagcagcatgagagcactgggcagccactttcccttttcccatctttaagtcatttcgaaccacaagaatcatcttgtactccccgctgtctcccaagatgcttgcttcactttcagtatctgtgtgtgtcttgctcgtcttgcttttggggagcatcccaaagcatactcgaaggctccagcccaggcacatgccacaagcaactccaacagccaagccgagtgtactgggatgagccaaatattccataaccaaggatttggagggcatctacagtacctcctttcctcactcgcgccttcccttcttctgggcagcgaacacgtttctatcgcgtgagctacctcttccggggttcctgggtgacaagttccggatcaagaatcacaaagcgagcagtcattcttcctcttgccacacccacagggcccgcactaagagcctaactgaaatcccgcgaggatcaaccgagctcgccgaaaggagggaggaacgtatcccttctggaggctgtctcagggggcagagggaccggaccggaagtgacgtgagcgggttccggttgtctggagcccagcggcgggtgtgagagtccgtaaggagcagcttccaggatcctgagatccggagcagccgggggtcggagcggctcctcaagagttactgatctatgaaatggcagagaatggaaaaaattgtgaccagagacgtgtagcaatgaacaaggaacatcataatggaaatttcacagacccctcttcagtgaatgaaaagaagaggagggagcgggaagaaaggcagaatattgtcctgtggagacagccgctcattaccttgcagtatttttctctggaaatccttgtaatcttgaaggaatggacctcaaaattatggcatcgtcaaagcattgtggtgtcttttttactgctgcttgctgtgcttatagctacgtattatgttgaaggagtgcatcaacagtatgtgcaacgtatagagaaacagtttcttttgtatgcctactggataggcttaggaattttgtcttctgttgggcttggaacagggctgcacacctttctgctttatctgggtccacatatagcctcagttacattagctgcttatgaatgcaattcagttaattttcccgaaccaccctatcctgatcagattatttgtccagatgaagagggcactgaaggaaccatttctttgtggagtatcatctcaaaagttaggattgaagcctgcatgtggggtatcggtacagcaatcggagagctgcctccatatttcatggccagagcagctcgcctctcaggtgctgaaccagatgatgaagagtatcaggaatttgaagagatgctggaacatgcagagtctgcacaagactttgcctcccgggccaaactggcagttcaaaaactagtacagaaagttggattttttggaattttggcctgtgcttcaattccaaatcctttatttgatctggctggaataacgtgtggacactttctggtacctttttggaccttctttggtgcaaccctaattggaaaagcaataataaaaatgcatatccagaaaatttttgttataataacattcagcaagcacatagtggagcaaatggtggctttcattggtgctgtccccggcataggtccatctctgcagaagccatttcaggagtacctggaggctcaacggcagaagcttcaccacaaaagcgaaatgggcacaccacagggagaaaactggttgtcctggatgtttgaaaagttggtcgttgtcatggtgtgttacttcatcctatctatcattaactccatggcacaaagttatgccaaacgaatccagcagcggttgaactcagaggagaaaactaaataagtagagaaagttttaaactgcagaaattggagtggatgggttctgccttaaattgggaggactccaagccgggaaggaaaattcccttttccaacctgtatcaatttttacaacttttttcctgaaagcagtttagtccatactttgcactgacatactttttccttctgtgctaaggtaaggtatccaccctcgatgcaatccaccttgtgttttcttagggtggaatgtgatgttcagcagcaaacttgcaacagactggccttctgtttgttactttcaaaaggcccacatgatacaattagagaattcccaccgcacaaaaaaagttcctaagtatgttaaatatgtcaagctttttaggcttgtcacaaatgattgctttgttttcctaagtcatcaaaatgtatataaattatctagattggataacagtcttgcatgtttatcatgttacaatttaatattccatcctgcccaacccttcctctcccatcctcaaaaaagggccattttatgatgcattgcacaccctctggggaaattgatctttaaattttgagacagtataaggaaaatctggttggtgtcttacaagtgagctgacaccattttttattctgtgtatttagaatgaagtcttgaaaaaaactttataaagacatctttaatcattccaaaattgtgtccgttttcttgagcgttttgattttttacttttagcttataccagctgaatggcagccttgcctaatccacctacaacaagaatttcttaagctttcttttatttgcatgagagagccactaccaaggcatgttttgttatgctgaaactgggctgctgcatactgctaaatggcacctctgggattggcctacctggggatttcttggtttgtgaaaacaggagaggagaaatatctcatacaagtgaaaggatactggagagagaaattacccatttctaaaaaaaaaccacactctgtcgtatctgtgttaatgttttctagcatgtactctggtttcaacagacacaaatttatatgttaacccagttttcttgccgttctgtaagtgttttattcttagtgtgatttttttccattgggatgtttttgattgaacttgttcattttgttttgcttgggaggaaaataaacaattttacttttttcctttaggagcattatgagcattatgtcagaatagaatagaattggggttcgatcttaacaggccagaaatgcctgggtttttttggtttgtttttgtttttgtttttttatcaaatcctgcctgactgtctgcttgttttgcctaccatcgtgacatctccatggctgtaccaccttgtcgggtagcttatcagactgatgttgactgttgaatctcatggcaacaccagtcgatgggctgtctgacattttggtatctttcatctgaccatccatatccaatgttctcatttaaacattacccagcatcattgtttataatcagaaactctggtccttctgtctggtggcacttagagtcttttgtgccataatgcagcagtatggagggaggattttatggagaaatggggatagtcttcatgaccacaaataaataaaggaaaactaagctgcattgtgggttttgaaaaggttattatacttcttaacaattctttttttcagggacttttctagctgtatgactgttacttgaccttctttgaaaagcattcccaaaatgctctattttagatagattaacattaaccaacataattttttttagatcgagtcagcataaatttctaagtcagcctctagtcgtggttcatctctttcacctgcattttatttggtgtttgtctgaagaaaggaaagaggaaagcaaatacgaattgtactatttgtaccaaatctttgggattcattggcaaataatttcagtgtggtgtattattaaatagaaaaaaaaaattttgtttcctaggttgaaggtctaattgatacgtttgacttatgatgaccatttatgcactttcaaatgaatttgctttcaaaataaatgaagagcagctgtccttctttcctcttttaagtgttcagctgtggcatgctcagaggttcctgctggattccagctggagcggtgtgatacccttctttttcagctgttcgtgccttcctttcttgtatccaccaaagtggagacaaatacatgatctcaaagatacacagtacctacttaattccagctgatgggagaccaaagaatttgcaagtggatggtttggtatcactgtaaataaaaagagggcctgggaattcttgcgattccatctctactttgtataagtctcattttgtgccttacacatctgcagtatttatcatgttccaacttggtgactgtcaggcagtgcaatacatcagcagtttatcaccgaagagctgaggaatacctcccttaaaacagacaatgtc

SEQ ID NO: 201 - DNA, 2394 bp, Homo sapiens
  misc_feature: Template ID: 1099099.16
tctcctctgaccttttcttcccatctcatgctgtgaactgtcttctgttgactttatcgctacctttcttcattctgttattcaaccatgatctctccgtttcattttataagcgttttattaatttcatttatgtatttatttttgactaggtaatgcatgtccatggtacacaaattcacaaggtttgtaaatgagaaaagacgtgaggttccttttgttctttacctgtggcctccctgccctacacggggactctagggtggaatgtagcaaagcccatccaccagccatgtactaccccccaacccggccaggctggagcgaccgtgtctggggagccgagccccgcttctcgctgcggtgagcccggactggggcacgcactgcgcagactccccgctgcagtgggcggagctcccacaggccccgccccctcctcccaccctcgttcagcctgtccagacagaagctggggcccagcggaggtagcagcagacgcctgagagcgaggccgaggcccctcagggtttggagaccctgacacacccaccttctcacctgggctctgcgtatcccccagccttgagggaagatgaagcctaaactgatgtaccaggagctgaaggtgcctgcagaggagcccgccaatgagctgcccatgaatgagattgaggcgtggaaggctgcggaaaagaaagcccgctgggtcctgctggtcctcattctggcggttgtgggcttcggagccctgatgactcagctgtttctatgggaatacggcgacttgcatctctttgggcccaaccagcgcccagccccctgctatgacccttgcgaagcagtggctggtggaaagcattcctgagggcctggacttccccaatgcctccacggggaacccttccaccagccaggcctggctgggcctgctcgccggtgcgcacagcagcctggacatcgcctccttctactggaccctcaccaacaatgacacccacacgcaggagccctctgcccagcagggtgaggaggtcctccggcagctgcagaccctggcaccaaagggcgtgaacgtccgcatcgctgtgagcaagcccagcgggccccagccacaggcggacctgcaggctctgctgcagagcggtgcccaggtccgcatggtggacatgcagaagctgacccatggcgtcctgcataccaagttctgggtggtggaccagacccacttctacctgggcagtgccaacatggactggcgttcactgacccaggtcaaggagctgggcgtggtcatgtacaactgcagctgcctggctcgagacctgaccaagatctttgaggcctactggttcctgggccaggcaggcagctccatcccatcaacttggccccggttctatgacacccgctacaaccaagagacaccaatggagatctgcctcaatggaacccctgctctggcctacctggcgagtgcgcccccacccctgtgtccaagtggccgcactccagacctgaaggctctactcaacgtggtggacaatgcccggagtttcatctacgtcgctgtcatgaactacctgcccactctggagttctcccaccctcacaggttctggcctgccattgacgatgggctgcggcgggccacctacgagcgtggcgtcaaggtgcgcctgctcatcagctgctggggacactcggagccatccatgcgggccttcctgctctctctggctgccctgcgtgacaaccatacccactctgacatccaggtgaaactctttgtggtccccgcggatgaggcccaggctcgaatcccatatgcccgtgtcaaccacaacaagtacatggtgactgaacgcgccacctacatcggaacctccaactggtctggcaactacttcacggagacggcgggcacctcgctgctggtgacgcagaatgggaggggcggcctgcggagccagctggaggccattttcctgagggactgggactccccttacagccatgaccttgacacctcagctgacagcgtgggcaacgcctgccgcctgctctgaggcccgatccagtgggcaggccaaggcctgctgggcccccgcggacccaggtgctctgggtcacggtccctgtccccgcacccccgcttctgtctgccccattgtggctcctcaggctctctcccctgctctcccacctctacctccacccccaccggcctgacgctgtggccccgggacccagcagagctgggggagggatcagcccccaaagaaatgggggtgcatgctgggcctggccccctggcccacccccactttccagggcaaaaagggcccagggttataataagtaaataacttgtctgtaaaaaaaaaaaaaagg

SEQ ID NO: 202 - DNA, 610 bp, Homo sapiens
  misc_feature: Template ID: 1099099.13
cgtctccgtgaagtagttgccagaccagttggaggttccgatgtagtggcgcgttcagtcaccatgtacttgttgtggttgacacgggcatatgggattcgagcctgggcctcatccgcggggaccacaaagagtttcacctggatgtcagagtgggtatggttgtcacgcagggcagccagagagagcaggaaggcccgcatggatggctccgagtgtccccagcagctgatgagcaggcgcaccttgacgccacgctcgtaggtggcccgccgcagcccatcgtcaatggcaggccagaacctgtgagggtgggagaactccagagtgggcaggtagttcatgacagcgacgtagatgaaactccgggcattgtccaccacgttgagtagagccttcaggtctggagtgcggccacttggacacaggggtgggggcgcactctgagggcgaggggacagttaagacatgtgccctgccagggtcatcgtcacaacggaccccacatacggacagctcaccacaagccaggtactgtggatctcaccaaatcctcagcctccatgaagaagagggtcaatcaccacatccatttcacatgtgaggaaac

SEQ ID NO: 203 - DNA, 1263 bp, Homo sapiens
  misc_feature: Template ID: 400253.14
cggcgatgtcgctcgtgctgctaagcctggccgcgctgtgcaggagcgccgtaccccgagagccgaccgttcaatgtggctctgaaactgggccatctccagagtggatgctacaacatgatctaatccccggagacttgagggacctccgagtagaacctgttacaactagtgttgcaacaggggactattcaattttgatgaatgtaagctgggtactccgggcagatgccagcatccgcttgttgaaggccaccaagatttgtgtgacgggcaaaagcaacttccagtcctacagctgtgtgaggtgcaattacacagaggccttccagactcagaccagaccctctggtggtaaatggacattttcctacatcggcttccctgtagagctgaacacagtctatttcattggggcccataatattcctaatgcaaatatgaatgaagatggcccttccatgtctgtgaatttcacctcaccaggctgcctagaccacataatgaaatataaaaaaaagtgtgtcaaggccggaagcctgtgggatccgaacatcactgcttgtaagaagaatgaggagacagtagaagtgaacttcacaaccactcccctgggaaacagatacatggctcttatccaacacagcactatcatcgggttttctcaggtgtttgagccacaccagaagaaacaaacgcgagcttcagtggtgattccagtgactggggatagtgaaggtgctacggtgcagctgactccatattttcctacttgtggcagcgactgcatccgacataaaggaacagttgtgctctgcccacaaacaggcgtccctttccctctggataacaacaaaagcaagccgggaggctggctgcctctcctcctgctgtctctgctggtggccacatgggtgctggtggcagggatctatctaatgtggaggcacgaaaggatcaagaagacttccttttctaccaccacactactgccccccattaaggttcttgtggtttacccatctgaaatatgtttccatcacacaatttgttacttcactgaatttcttcaaaaccattgcagaagtgaggtcatccttgaaaagtggcagaaaaagaaaatagcagagatgggtccagtgcagtggcttgccactcaaaagaaggcagcagacaaagtcgtcttccttctttccaatgacgtcaacagtgtgtgcgatggtacctgtggcaagagcgagggcagtcccagtgagaactctc

SEQ ID NO: 204 - DNA, 5105 bp, Homo sapiens
  misc_feature: Template ID: 400253.17
  unsure 2827-3119, 3484, 5075: a, t, c, g, or other
aataaaatggattgtcttcttctgcaacaccttaaagaaactttttgtcatttagatcagcatcttttcctggaatcaggacatctctgggcttcaggaccatgagtttcagattcgacatcctgattctcctgccctgctttaccagtttcgattaggagatgaaaaactgcaggctccaatggctttgttttaccccgcaacttttggaattgttggacagaaaatgacgactttgcagcacagatctcagggcgatcctgaggatcctcacgatgaacattacctgctggccacacagagcaaacaagaacagtctgcaaaagctactgctgaccgaaagtctgcatccaaacctattggatttgaaggggatcttcgtggccagtcctctgatcttccagaaagactccattcccaggaggtagatttggggtctgcacagggagatggcctgatggccggcaacgattccgaggaggccctcactgcactgatgtccaggaagactgccatctcgctgtttgaagggaaagccctgggcctggataaagccatcctccatagcatagactgctgttcatctgacgacaccaaaaagaagatgtacagctccatcctagtggtgggaggtggtttgatgtttcataaagctcaagaatttctgcagcacagaattctcaacaaaatgccaccatccttcaggcgaattattgaaaatgtggatgtgatcacaaggcctaaggacatggacccccggctgattgcatggaaaggaggggcagtgttggcttgtttggatacaacacaggaactgtggatttatcagcgagagtggcagcgctttggtgtccgcatgttacgagagcgggctgcgtttgtgtggtgaatggggaggaaatgtcactgccgaagaccaaaaacaagcttcttggtataaaagactcttacagaatatgtgtattgtaatttattgatctggatgcttaagtgtcatggacagtaaatgaatttgaactttatgttgaggacatgacattggtttgaaaatataaactgcttttgagcagtttagtcagggcatttgagaataaataggaactttctcttcagttgtaaactctcttgccctctctcagggtctcataaactccccagtgatgtaaacgttgctattgaaggttctcatgtggtgaagcccttcatttaagttggcttgaatctcatcagcaggcagcctcatgcaaccatgagggatagtatgtgacgagggagaactgtccactcatgccattttctctcttgtctagtatttcattaggatctaaagttgtctgagttaaatgcacttatgtgactcatgtgtcctcttagaatcccaaatagggggaaaaagttttggtggtttttgtttttttttcattttctgttggattacagaaaaagaatgggacccattcaggtctcgatttccaaaggtaaagatggaaggctgggcagactggcttttgttacctgacatgccgtagggtgagcttagaggaagaaagaaaacaatttttatttggccaaaacagaacaaatgctgaaaaggaaatcttgtttttttcctaaagccaaatagaaatgatttgggtataatttaagagtccttgtgttgtacagatatggtgactgatgtagttattaatactaccaacttagtcatcaagcctcaattttcctttacctgaaggattaagtgaaagcttttggagttcatgatgttcagtatgatcagttaaccttaacctctgagcatcctgaagcaaaatctaaataatgcagctattaccactggtggtccaggctctggtgaagccctctgagcccaggaggaagagaaagcattgtccagaggtaggaacacagtctgggagcccagagctctgggaggagtgggaaaatgctgcttactgctgcttgcttctaggcacctgcttccgccatctcacttaccatggctagagatgggggtgagactggggaaggacaaaagcagggaacagataagggatggaaatcagaagggaatatagaaagaactctggatgtggagaaatgccggtacctgagcattttgtatcaatgggagtaccctctgtaactgctcagtaggttacaaatgaagagtccaccagtattagaaacaatttaaacttgccagtaccaactgggatgtgtgccttcaatttgaaaattgtatgttttattttttaaatttgttaacagcattaatttatagagtattgatgtcatttatgtttctgaggtgtttcaacacaattttggatcagctgcctgtttgcaaaaacataatatatttctgttaaacagttcttcacctaacagcatattgctcttataactggtagagctgtttcaaaggaagttggtttctggtccaagttttgacctaaaccatgtccatcttctattaccagcacttacaagcactgtgaaaactgatcatgacaaataagtaaaatttgctacattaaacatattgcctcagccattactaagcgtccacttgtaaagctggacacagtttttactttatgcttcattttgattttttatccgtaagacataaattagaaggcatgaggtggccctttaaggataatctgcaaatatacacattttaatagtcatccatctgaaatcgatccacattccagagaagattcagtattgtgctgtgtgaaataagcattcccagaaaaaaaacatttatgctaataatacaacataacctctgcattaaagaaaaagatgcttttannnnnnnnnnnnnnnnnnnnnnnnnnnnnnnnnnnnnnnnnnnnnnnnnnnnnnnnnnnnnnnnnnnnnnnnnnnnnnnnnnnnnnnnnnnnnnnnnnnnnnnnnnnnnnnnnnnnnnnnnnnnnnnnnnnnnnnnnnnnnnnnnnnnnnnnnnnnnnnnnnnnnnnnnnnnnnnnnnnnnnnnnnnnnnnnnnnnnnnnnnnnnnnnnnnnnnnnnnnnnnnnnnnnnnnnnnnnnnnnnnnnnnnnnnnnnnnnnnnnnnnnnnnnnnnnnnnnnnnnnnnnnnnnnnnnntttaaaaaatttaaaaaagatgcttttagaagagtaaaaagttggaagacaaaatgtgcatcttttatgttctgtcattctgtgggggttttttcgtttgtttgttttagacagggtctgctctcacccaggatggagtgcagtggcacaatcaccgtttactgcacccttgacctccagggctcaagtgatcctcccatctcagcctccctagtagctgggaccacaggcttacaccatcacactcagctaattttttaaatcttttgtagagatggaggtctcgctttgtgacgtagcctggtcttgagcgatccttttgccttggccttgccaaagtgctgggattggaggcatgagccacngcacccacccctgttttttatttaagtaaaccattataataactcatttataaaaaggttacttcaagagggctttcaacttaagaattattttcattttgaacatgaaaagttaaatagtaactaagaaactgagaactctgacagtgacctctaataggtaactttaggcaaaagtagacaagtttgtgggtattttgttgttcatgttaaaaggcacctgtacaagaatcaagatatgaatctagtttgtagagggaaggtcttatgcaaataccaaatcatacaagtggttacacatataatagatcatttggtccagtaaaagtgggttcagcttgtttattccctacttttgttatcttaaaaacaatgattttttgcatgtaatagaaggtttttcacttaagatgctattgagtgaatcagtgaggggttcttagagttagtattcattaattaaacatagaatattagctaaacagttctgggtacactgcaatgcatggtctatggaagactagatgtttggctgaagatgctttattgttgcattatcaaaatggttacagttttcaattaaagctgtaattgatttctatgtataaaacagctttgaagttgtaaatgtagtttccaatcgttagttaatgctacattagttagcaatatttgaaaattttattggtataaaatgttttaattactaaggctgtttgtaggctgcatagtaagcttcaggatcatcacacgttttttccctgtaattggtgggataggaagcctttaaggtctcttgcttctcatgggtgggctacaaggagcagcagccatcgtggcaggcttgtgatctttttcctgctgacacctgctgcttgacatggagaagttctgcacagaaagcagtggcatccttcatgaggtggtacttggggcagacactgagagcattgtaatcgtcttttgtatcaatctctctaaagtagaccaccacgtatttgtgcagatgaatctggcttcttagatcactgcagaaaaggttaaaggcaagggggaagaggtcttgagagttctcactgggactgccctcgctcttgccacaggtaccatcgcacacactgttgacgtcattggaaagaaggaagacgactttgtctgctgccttcttttgagtgggcaagccactgcactggacccatctctgctattttctttttctgccacttttcaaggatgacctcacttctgcaatggttttgaagaaattcagtgaagtaacaaattgtgtgatggaaacatatttcagatgggtaaaccacaagaaccttaatggggggcagtagtgtggtggtagaaaaggaagtcttcttgatcctttcgtgcctccacattagatagatccctgccaccagcacccatgtggccaccagcagagacagcaggaggagaggcagccagcctcccggcttgcttttgtctggaaaaaacaaagcttattcacctttggaaaacaaatccacacttatctcttaatttaaaaactaagacttggtatactttatagaggtttatttattttttattatttttnagttttgagacagagctcgtttgttgccta

SEQ ID NO: 205 - DNA, 1182 bp, Homo sapiens
  misc_feature: Template ID: 085803.4
cttgctctgaccactcagacaccgtgtcctcttgcctgggagaggggaagcagatctgaggacatctctgtgccaggccagaaaccgcccacctgcaggtgaggcccggacccctgcccagttccttctccgggatggacgtggggcccagctccctggccccaccttgggctgaagctgctgctgctcctgctgctgctgcccctcaggggccaagccaacacaggcttgctacgggatcccagggatgcccggcctgcctggggcaccagggaaggatgggtacgacggactgccggggcccaagggggagccaggaatcccagccattcccgggatccgaggacccaaagggcagaagggagaacccggcttacccggccatcctgggaaaaatggccccatgggaccccctgggatgccaggggtgcccggccccatgggcatccctggagagccaggtgaggagggcagatacaagcagaaattccagtcagtgttcacggtcactcggcagacccaccagccccctgcacccaacagcctgatcagattcaacgcggtcctcaccaacccgcagggagattatgacacgagcactggcaagttcacctgcaaagtccccggcctctactactttgtctaccacgcgtcgcatacagccaacctgtgccgtgctgctgtaccgcagcggcgtcaaagtggtcaccttctgtggccacacgtccaaaaccaatcaggtcaactcgggcggtgtgctgctgaggttgcaggtgggcgaggaggtgtggctggctgtcaatgactactacgacatggtgggcatccagggctctgacagcgtcttctccggcttcctgctcttccccgactagggcgggcagatgcgctcgagacccacgggccttccacctccctcagcttcctgcatggacccaccttactggccagtctgcatccttgcctagaccattctcccctccagggagcccaccctgacccacccccactgcaccccctccccatgggttctctccttcctctgaacttctttaggagtcactgcttgtgtggttcctgggacacttaaccaatgccttctggtactgccattcttttttttttttttcaagtattggaaggggtggggagatatataaataaatcatgaaatcaatacat

SEQ ID NO: 206 - DNA, 1953 bp, Homo sapiens
  misc_feature: Template ID: 253868.2
gccgccgggagccggtgcggctgtgaggggccgcgtctcgcagcagccgcccggaccgggcatggtgttgggcgccgggcccgcctcgcctgtctcggggagcccagggtaaaggcagcagtaatgctaacgctagcaagtaaactgaagcgtgacgatggtctcaaagggtcccggacggcagccacagcgtccgactcgactcggagggtttctgtgagagacaaattgcttgttaaagaggttgcagaacttgaagctaatttaccttgtacatgtaaagtgcattttcctgatccaaacaagcttcattgttttcagctaacagtaaccccagatgagggttactaccagggtggaaaatttcagtttgaaactgaagttcccgatgcgtacaacatggtgcctcccaaagtgaaatgcctgaccaagatctggcaccccaacatcacagagacaggggaaatatgtctgagtttattgagagaacattcaattgatggcactggctgggctcccacaagaacattaaaggatgtcgtttggggattaaactctttgtttactgatcttttgaattttgatgatccactgaatattgaagctgcagaacatcatttgcgggacaaggaggacttccggaataaagtggatgactacatcaaacgttatgccagatgataaaaggggacgattgcaggcccatggactgtgttacagtttgtctctaacatgaaacagcaagaggtagccccctctcccgtcctcatgctccctctcagtcccctggattgccccagtcctgtgaccatgttgccctgaagaagaccatcttcatgactgctcattgtagatggagaattcaacataaatacagcaagaaaatgtgtttgggcttctgaagagttgtctgcttaccttaacatgtttacttttttgaacttgtactgtataggctgttggtgaaattcttaagaagttgtaatgaactcaaaattgaggccagagcttgctttcccttttcccaaacaaaattggttttctgcacaagcgatgctaatgatgtgttcagtgtaactcgcagattggcaataagatacccgctacaaactgtgattggatgcaaaatctcttagcttctttcacgaatgttggccctgcctagatgttgtgaagcctcccagaatgcatagagtcattcactgtagatctcttattgaaatgcgtattttatttaatgtaagtatattttggaacagatttgtaatttgtacaattcaatgctttaattattttttctattctcatttagtttgtattttcattgtatagagcagacagaaagatgttgggtcaagcaactattgaagagaaatacaaagaaaatatgaaaggcacattattcattttgtccaaatgcaatgagaatctcactcttaaaaatcagctcttgctttcgggtccggatgtggtgagcacattttggagccctttgaagctagatttggatgatcaaaacaaaaaggcagggagcccattctaacatgctgcccagaggaaactggctggagcctggaccagctggggctgatgcttttgcagtggtcatgtgattgtgacctggtagctacttatcagagagccagaccctgctgtcctgggagacaggagcgatgcctcaggaatcagcccaatgtctgatgtcactgagactgtacctgtggccttcttctgagtttgctatggctccaggccctgccggtggggtgagcctcctaggccttggaggaccaggagtcaacagtggcatatgccatcctcggccaggttaatatactgcagaggaaaagccctgaagagaggcaagtggatttactccagcatgtagacatttgaaccagtgaaatcaaacacaaaataaatgtctgtctagtttcaaaaaaaaaaaaaagg

SEQ ID NO: 207 - DNA, 1817 bp, Homo sapiens
  misc_feature: Template ID: 158923.9
gcctgttccctctgctctgggtctccgccggcgcccgccccgccagcctcacctgcgcggcacgtgacccgcaccgcccgtgggcaccttgaaggcggatcccgcgcgcccccgctcctgcaggctgtttttcttcaaataaagaacatggtgaaactgattcacacattagctgatcatggtgacgatgtcaactgctgtgccttctccttttccctcttggctacttgctccttggacaaaacaattcgcctgtactcgttacgtgactttactgaactgccacattctccattgaagtttcatacctatgctgtccactgctgctgtttctccccttcaggacatattttggcatcgtgttcaacagatggtaccactgtcctatggaatactgaaaatggacagatgctggcagtgatggaacagcctagtggcagccctgtgagggtttgccagttttccccagactccacgtgtttggcatcaggggcagctgatggaactgtggttttgtggaatgcacagtcatacaaattatatagatgtggtagtgttaaagatggctccttggcggcatgtgcattttctcctaatggaagcttctttgtcactggctcctcatgtggtgatttaacagtgtgggatgataaaatgaggtgtctgcatagtgaaaaagcacatgatcttggaattacctgctgcgatttttcttcacagccagtttctgatggagaacaaggtcttcagttttttcgactggcatcatgtggtcaggattgccaagtcaaaatttggattgtttcttttacccatatcttaggttttgaattaaaatataaaagtacactgagtgggcactgtgctcctgttctggcttgtgctttttcccatgatgggcagatgctagtctcagggtcagtggataagtctgtcatagtatatgatactaatactgagaatatacttcacacattgactcagcacaccaggtatgtcacaacttgtgcttttgcacctaatacccttttacttgctactggttcaatggacaaaacagtgaacatctggcaatttgacctggaaacactttgccaagcaaggagcacagaacatcagctgaagcaatttaccgaagattggtcagaggaggatgtctcaacatggctttgtgcacaagatttaaaagatcttgttggtattttcaagatgaataacattgatggaaaagaactgttgaatcttacaaaagaaagtctggctgatgatttgaaaattgaatctctaggactgcgtagtaaagtgctgaggaaaattgaagagctcaggaccaaggttaaatccctttcttcaggaattcctgatgaatttatatgtccaataactagagaacttatgaaagatccggtcatcgcatcagatggctattcatatgaaaaggaagcaatggaaaattggatcagcaaaaagaaacgtacaagtcccatgacaaatcttgttcttccttcagcggtacttacaccaaataggactctgaaaatggccatcaatagatggctggagacacaccaaaagtaaaattgttgatattgtattatttatattttcagtgatctcatttgaatgatttataggtaaatactaatcagacattattaaaagcaaaacaggaaaaaggtaaacttcttaaatttagttacctataaaaattgtcaattttcattctttaaaaaacacatggacttactataaaagcctttttgtactagtgaaaagaatcttcagctatatagaaataaagttatactttaaattgc

SEQ ID NO: 208 - DNA, 3970 bp, Homo sapiens
  misc_feature: Template ID: 199716.3
  unsure 250-273: a, t, c, g, or other
cgggaacctggcgcgccggaactgatcgcggctagtcccgacgcgtgtgtgctagtgagccggagccggcgacggcggcagtggcggcccggcctgcaggagcccgacggggtctctgccatgggggagtgacgcgcctgcacccgctgttccgcggcagcggcgagacatgaggagaccccgcgacaggggcagcggcggcggctcgtgagccccgggatggaggagaaatacggcggggacgtgctgnnnnnnnnnnnnnnnnnnnnnnnncttgggccggtggacgtacccagcgctcgattaacaaaatatattgtgttactatgtttcactaaatttttgaaggctgtgggacttttcgaatcatatgatctcctaaaagctgttcacattgttcagttcatttttatattaaaacttgggactgcattttttatggttttgtttcaaaagccattttcttctgggaaaactattaccaaacaccagtggatcaaaatatttaaacatgcagttgctgggtgtattatttcactcttgtggttttttggcctcactctttgtggaccactaaggactttgctgctatttgagcacagtgatattgttgtcatttcactactcagtgttttgttcaccagttctggaggaggaccagcaaagacaaggggagctgcttttttcattattgctgtgatctgtttattgctttttgacaatgatgatctcatggctaaaatggctgaacaccctgaaggacatcatgacagtgctctaactcatatgctttacacagccattgccttcttaggtgtggcagatcacaagggtggagtattattgctagtactggctttgtgttgtaaagttggttttcatacagcttccagaaagctctctgtcgacgttggtggagctaaacgtcttcaagctttatctcatcttgtttctgtgcttctcttgtgcccatgggtcattgttctttctgtgacaactgagagtaaagtggagtcttggttttctctcattatgccttttgcaacggttatcttttttgtcatgatcctggatttctacgtggattccatttgttcagtcaaaatggaagtttccaaatgtgctcgttatggatcctttcccatttttattagtgctctcctttttggaaatttttggacacatccaataacagaccagcttcgggctatgaacaaagcagcacaccaggagagcactgaacacgtcctgtctggaggagtggtagtgagtgctatattcttcattttgtctgccaatatcttatcatctccctctaagagaggacaaaaaggtacccttattggatattctcctgaaggaacacctctttataacttcatgggtgatgcttttcagcatagctctcaatcgatccctaggtttattaaggaatcactaaaacaaattcttgaggagagtgactctaggcagatcttttacttcttgtgcttgaatctgctttttacctttgtggaattattctatggcgtgctgaccaatagtctgggcctgatctcggatggattccacatgctttttgactgctctgctttagtcatgggactttttgctgccctgatgagtaggtggaaagccactcggattttctcctatgggtacggccgaatagaaattctgtctggatttattaatggactttttctaatagtaatagcgttttttgtgtttatggagtcagtggctagattgattgatcctccagaattagacactcacatgttaacaccagtctcagttggagggctgatagtaaaccttattggtatctgtgcctttagccatgcccatagccatgcccatggagcttctcaaggaagctgtcactcatctgatcacagccattcacatcatatgcatggacacagtgaccatgggcatggtcacagccacggatctgcgggtggaggcatgaatgctaacatgaggggtgtatttctacatgttttggcagatactcttggcagcattggtgtgatcgtatccacagttcttatagagcagtttggatggttcatcgctgacccactctgttctctttttattgctatattaatatttctcagtgttgttccactgattaaagatgcctgccaggttctactcctgagattgccaccagaatatgaaaaagaactacatattgctttagaaaagatacagaaaattgaaggattaatatcataccgagaccctcatttttggcgtcattctgctagtattgtggcaggaacaattcatatacaggtgacatctgatgtgctagaacaaagaatagtacagcaggttacaggaatacttaaagatgctggagtaaacaatttaacaattcaagtggaaaaggaggcatactttcaacatatgtctggcctaagtactggatttcatgatgttctggctatgacaaaacaaatggaatccatgaaatactgcaaagatggtacttacatcatgtgagataactcaagaattacccctggagaataaacaatgaagattaaatgactcagtatttgtaatattgccagaaggataaaaattacacattaactgtacagaaacagagttccctactactggatcaaggaatctttcttgaaggaaatttaaatacagaatgaaacattaatggtaaaagtggagtaattatttaaattatgtgtataaaaggaatcaaattttgagtaaacatgatgtattacatcatcttcaaaaatagatatgatggattctagtgaagaccaaaattacttctgtttactttctatcaggaagcatctccattgtaaatatgtatttacatgtttattacaaagacccaaatgaaaaatttttagtccattttttgcatagcctaaagataaaataggaataaaagttctatatttatggattttctgtatataaaactggtttctaattataacttaagtccattaagtaaaatctgtattgccactttaaatgtaaactaaattatttgggagaaacttcaaccactgatatgagataagcaatgagaatagggaagtgtataacatcacagtttttgatgtattacaaaaatcaaccactctataaaataaattttttttacttttggtaatatttgcaaatgaataattaatttattagggtaaagaacttatactaagttgtgtccatgttattcatttacttaccatgttcctttaaagtagaatatttcctttcttgttatatatttgacattccaagctgcttatcaagctggtatccaagcagtggtaagctttcatcctttcttagctccataacgttgtgaaacagccagttaagagaatcgtaaataattgtcaactcacagttgaattctctgcctatgtaggtaacttttttctaatttctggaacatatagatatataagaaatatcaaagaataggtagttatttcaaagtttaataagtaaaacttgttcataaacatttgagcaccatgaaatcaaaataccctataactactttctatagtcatatctaatttatatttttttcatttccagttgtaactagatatgtagtaaagtctgaaaagactttaccatagacaataacatgcagttttatcagcaccaaagaatgttgtccaaaagaaactttttaatacctgtctttctatttataacatctgaatattttcattcttatattaagaattttgataagtagattgaatttagtatgagtactattttcttatatataccacaatggcaaacatgtattataaatcatatttttgtcttaccaattttaatatatgaggggttttagaaatttgttgtaagttatttttatattccttgtcttttgcatattttttggccaaaatcttcaatacatattaaaatttttgagtggtgggaaaaa

SEQ ID NO: 209 - DNA, 3503 bp, Homo sapiens
  misc_feature: Template ID: 252899.8
  unsure 845: a, t, c, g, or other
gagccgcctttcctgggcctcaggcggattctccggcgcggcccgccccgcccctcggactccccgggccgcccccggcccccattcgggccgggcctcgctgcggcggcgactgagccaggctgggccgcgtccctgagtcccagagtcggcgcggcgcggcaggggcagccttccaccacggggagcccagctgtcagccgcctcacaggaagatgctgcgtcggcggggcagccctggcatgggtgtgcatgtgggtgcagccctgggagcactgtggttctgcctcacaggagccctggaggtccaggtccctgaagacccagtggtggcactggtgggcaccgatgccaccctgtgctgctccttctcccctgagcctggcttcagcctggcacagctcaacctcatctggcagctgacagataccaaacagctggtgcacagctttgctgagggccaggaccagggcagcgcctatgccaaccgcacggccctcttcccggacctgctggcacagggcaacgcatccctgaggctgcagcgcgtgcgtgtggcggacgagggcagcttcacctgcttcgtgagcatccgggatttcggcagcgctgccgtcagcctgcaggtggccgctccctactcgaagcccagcatgaccctggagcccaacaaggacctgcggccaggggacacggtgaccatcacgtgctccagctaccagggctaccctgaggctgaggtgttctggcaggatgggcagggtgtgcccctgactggcaacgtgaccacgtcgcagatggccaacgagcagggcttgtttgatgtgcacagcatcctgcgggtngtgctgggtgcaaatggcacctacagctgcctggtgcgcaaccccgtgctgcagcaggatgcgcacagctctgtcaccatcacaccccagagaagccccacaggagccgtggaggtccaggtccctgaggacccggtggtggccctagtgggcaccgatgccaccctgcgctgctccttctcccccgagcctggcttcagcctggcacagctcaacctcatctggcagctgacagacaccaaacagctggtgcacagtttcaccgaaggccgggaccagggcagcgcctatgccaaccgcacggccctcttcccggacctgctggcacaaggcaatgcatccctgaggctgcagcgcgtgcgtgtggcggacgagggcagcttcacctgcttcgtgagcatccgggatttcggcagcgctgccgtcagcctgcaggtggccgctccctactcgaagcccagcatgaccctggagcccaacaaggacctgcggccaggggacacggtgaccatcacgtgctccagctaccggggctaccctgaggctgaggtgttctggcaggatgggcagggtgtgcccctgactggcaacgtgaccacgtcgcagatggccaacgagcagggcttgtttgatgtgcacagcgtcctgcgggtggtgctgggtgcgaatggcacctacagctgcctggtgcgcaaccccgtgctgcagcaggatgcgcacggctctgtcaccatcacagggcagcctatgacattccccccagaggccctgtgggtgaccgtggggctgtctgtctgtctcattgcactgctggtggccctggctttcgtgtgctggagaaagatcaaacagagctgtgaggaggagaatgcaggagctgaggaccaggatggggagggagaaggctccaagacagccctgcagcctctgaaacactctgacagcaaagaagatgatggacaagaaatagcctgaccatgaggaccagggagctgctacccctccctacagctcctaccctctggctgcaatggggctgcactgtgagccctgcccccaacagatgcatcctgctctgacaggtgggctccttctccaaaggatgcgatacacagaccactgtgcagccttatttctccaatggacatgattcccaagtcatcctgctgccttttttcttatagacacaatgaacagaccacccacaaccttagttctctaagtcatcctgcctgctgccttatttcacagtacatacatttcttagggacacagtatactgaccacatcaccaccctcttcttccagtgctgcgtggaccatctggctgccttttttctccaaaagatgcaatattcagactgactgaccccctgccttatttcaccaaagacacgatgcatagtcaccccggccttgtttctccaatggccgtgatacactagtgatcatgttcagccctgcttccacctgcatagaatcttttcttctcagacagggacagtgcggcctcaacatctcctggagtctagaagctgtttcctttcccctccttcctcctcttgctctagccttaatactggccttttccctccctgccccaagtgaagacagggcactctgcgcccaccacatgcacagctgtgcatggagacctgcaggtgcacgtgctggaacacgtgtggttcccccctggcccagcctcctctgcagtgcccctctcccctgcccatcctccccacggaagcatgtgctggtcacactggttctccaggggtctgtgatggggcccctgggggtcagcttctgtccctctgccttctcacctctttgttcctttcttttcatgtatccattcagttgatgtttattgagcaactacagatgtcagcactgtgttaggtgctgggggccctgcgtgggaagataaagttcctccctcaaggactccccatccagctgggagacagacaactaactacactgcaccctgcggtttgcagggggctcctgcctggctccctgctccacacctcctctgtggctcaaggcttcctggatacctcacccccatcccacccataattcttacccagagcatggggttggggcggaaacctggagagagggacatagcccctcgccacggctagagaatctggtggtgtccaaaatgtctgtccaggtgtgggcaggtgggcaggcaccaaggccctctggacctttcatagcagcagaaaaggcagagcctggggcagggcagggccaggaatgctttggggacaccgaggggactgccccccacccccaccatggtgctattctggggctggggcagtcttttcctggcttgcctctggccagctcctggcctctggtagagtgagacttcagacgttctgatgccttccggatgtcatctctccctgccccaggaatggaagatgtgaggacttctaatttaaatgtgggactcggagggattttgtaaactgggggtatattttggggaaaataaatgtctttgtaaaaagctttttctctgtgaagtgtttggaagcagggtgggccccaggactcaaccagcaggattctctcctggatgttgcaggctggggtagggaagcctggccctccttatctcaccgtccttaaatc

SEQ ID NO: 210 - DNA, 1604 bp, Homo sapiens
  misc_feature: Template ID: 327544.2
gcgcgaccgacgactggagcgcagggcaggggtagaggctcgtagatggaactggtagtcagctggagagcagcatggaggcgtcctgggggagcttcaacgctgagcggggctggtatgtctctgtccagcagcctgaagaagcggaggccgaagagttgagtccgttgctaagcaacgaacttcacagacagcgatccccaggtgtttcatttggtttatcagtgtttaatttgatgaatgccatcatgggaagtggcatccttggcttagcttatgttatggctaataccggtgtctttggatttagcttcttgctgctgacagttgctctcctggcttcttactcagtccatcttctgcttagtatgtgtattcagacagctgtaacatcttatgaagatcttggactctttgcatttggattacctggaaagttggtggtggcaggcaccataataattcagaatattggagctatgtcatcttatcttttaattattaaaacagagcttcctgctgctattgcagaatttttgactggagactatagtagatattggtatcttgatggacaaacactactaataatcatatgtgttggcattgtgttccctcttgcacttcttcccaaaataggctttcttggctacacaagtagtttatcatttttctttatgatgttctttgctcttgtggtaataattaaaaaatggtccatcccttgtcctctgacattaaattatgtagagaaaggtttccagatttcaaatgttacagatgattgtaagccaaagctctttcatttctccaaagagagtgcttatgccttaccaaccatggctttttcatttctctgccatacctcaatattgcccatatactgtgaacttcaaagtccttcaaagaaaagaatgcagaatgttaccaatacagcaattgctttaagttttctcatttattttatatctgcactctttgggtacctcactttttatgacaaagtggagtcagaattactaaaaggttatagtaaatacttatcacatgatgttgttgtcatgactgtgaagttatgcatactatttgctgtgcttttgacagtccctctaatccacttccctgccagaaaagctgtaacaatgatgtttttctccaattttccattctcatggattcgccattttttgatcactctagcactcaatattatcatcgttttacttgcaatatatgttcctgacattagaaatgtatttggtgtagttggtgccagtacatcaacatgtttgatttttatattcccaggactattttatcttaaacttagcagagaggattttctgtcatggaaaaagcttggggcattcgttttgctcatctttggaattttggttgggaattttagtttagcactcatcatttttgattggattaataaataaaagaaatattttcctacttcttacaagaataatatacccctagttgcaagaatgaattattccggaagacaccctggatgaaaaataacattttaataaaaattattaacagaaaagcagaacaaaatggcagtgggtatggggaagtaagagtgtagc

SEQ ID NO: 211 - DNA, 1074 bp, Homo sapiens
  misc_feature: Template ID: 334842.5
  unsure 457: a, t, c, g, or other
gacatggagagggatgtagtaaaatagagactttatacttttaattgcttaaaaataaagtacgtcattcagagatcttacacttaatatctgtttttatttgcaattttcatagcgtcgtctcggagatgcagccaagaaagccatcagtaaattgacaaccaggacagtaaagaagggtgacaaggaaactgacccagactttgatcattgtgcagtctgcatagagagctataagcagaatgatgtcgtccgaattctcccctgcaagcatgttttccacaaatcctgcgtggatccctggcttagtgaacattgtacctgtcctatgtgcaaacttaatatattgaaggccctgggaattgtgccgaatttgccatgtactgataacgtagcattcgatatggaaaggctcaccagaacccaagctgttaaccgaagatcagccctcggcganctcgccggcgacaactcccttgggcttgagccacttcgaacttcggggatctcacctcttcctcaggatggggagctcactccgagaacaggagaaatcaacattgcagtaacaagtggtcacttctttcatcgaaactccttgtcccctcggagtctggtgtatgaaagtgaattctccaccatcgaaccttctttggacatgtatgatgagaacaaaacctgaattttaaacatggcctggctgttggggtcactgcttttgtgatttgatttctgatcacctttcttattttgtattctcctgtcagcatccgttttggaagaatggcagcactttccaagcacaggttggggttcagggttaatttgcaaagttcccccaaggtgaggctttgaggacagtagcattgcccaggtgagccttgtggtattgaaaacccgcccaagctgatcattgaaggtgggcgcccagcaaggctggctgtttccagagaagaggccgggcccaggattaatgttgcattgcagacgcatctctgaacaatcacatgctgttctgcaccagggaagctggggtttttaacatccttttgtggtccctgcttacgatgcata

SEQ ID NO: 212 - DNA, 2078 bp, Homo sapiens
  misc_feature: Template ID: 406770.1
  unsure 249: a, t, c, g, or other
cccagtcctggactgccgggcccttcgatggcagcgtcctgcacggcctcccaggccgcagccaaccttcgtgtccgacttcttggaggagttcccgggtgagggtcgtgagtgtgtcaactgcggggccctgtccacaccgctgtggcgccgagacggcaccggccactacctgtgcaatgcctgcggcctctaccacaagatgaatggcgtcaaccggccgctcgttcggcctcagaagcgcctgtnctcgtcccgccgcgccggcctctgctgcaccaactgccacacgaccaacaccacgctgtggcggcggaactcggagggggagcccgtgtgcaatgcctgcggcctctacatgaagctgcacggggtgccgcggcctctggtatgaagaaagaaagcatccagacacggaagcggaagccaaagaccatcgccaaggccaggggctcctcaggatccacaaggaatgcctcggcctccccatctgctgtcgccagcactgacagctcagcagccacttcgaaagccaagcccagcctggcgtccccagtgtgccctgggcccagcatggccccccaggcctctggccaggaggatgactctcttgcccccggccacttggagttcaagttcgagcctgaggactttgccttcccctccacggccccaagcccccaggctggcctcaggggggctctgcgccaagaggcctggtgtgcgctggccttggcctaggtccccaggccagcccatgtcaggggaacagcctggaacagaccacccactgagtcacctccgtgcctgctttgctccagcacagcagagaccagcaggccccccaacccagagactgggtctgctggagtctccacacagtggtggggaggccttctggacagacggcagtcgggccccagagcaagaaggctggtgagggaagggctcagcttcccaccccacgtacagcaagggactccccaggtgcggcccaaggctccggaccacactggccccctgcggcggaggccaacgcagggcaccaccaccaccaacttgaattccgtcatcaatgctcaccgtcaatatgtttacaagttgtagcagttgggggaaaacagtcaacctcccagtgtaaaaccaagattcccagtgaagcacctgaggccaagcaggggagaggaatgaggggagcagctggacatgggcctcctgaggcctcggggctgtccttcattgcccacatggatagacggagctgtggtgcagagaacttttcccgcaacaggtgcaggactgccagggatcggagtgcgggccgcgcacggtgccaggattccgccgaggggaagccgctcacattgcagtcatcacagacttacgcacttgtttggacagtttttccagaggggatgggaaagggccttgttctagctgaatctgtgtatcatgaccatttctgacaggcagaatgaattgtctggtagccctgtcctgacccatccaagcgctgttggggctggtggtgacgtggtcacatgtcctggcatatctggggccacgcagtttagtctcttgtcccaggagaattgttagtgacccctctttctcttgcaagccccctccacactgggttggatgataccttaatgagtgacgctggcgagaggcaccctacccgacgcagctgtgaatggccggtgatgtatgtcaggaggccacagggagcggaggagcggggcaggcagccacagggccctgcggggagcacatcctcgcctccgtccggctgctgcccttcaacaacaagccctgatttttccagcaatgccagaaacctggattttaagtcttccaatttgattcaaaaatatttttaacattgtgagccagctagacccccagtgcaccaccccatattgaaaaacagttgtctggcatcagcttcaggagcgggtccggtcattctgaaactgtccctccagaggttcttccagccccacttctatgcgatgtcatcttttctaaaagagacaaatgaagccacagggaaagtgaaataaagcttgaacctc

SEQ ID NO: 213 - DNA, 627 bp, Homo sapiens
  misc_feature: Template ID: 996806.15
ggaaaccgctcccgagcacggcggcggcgtcgtctcccggcagtgcagctgccgcttaccgccgccctctgcccgccggcccgtctgtctacccccagcatgagcggcctgcgcgtctacagcacgtcggtcaccggctcccgcgaagactatgagctcttcgtggaggctgtggaacaaaacacgctgcaggagttcctgaagctggcttgagtcaagcctgtccagagttcccctgctggactccatcaccacactccccccagccttcacctggccatgaaggaccttttgaccaactccctgtcattcctaacctaacctgagagtccctcccccaatgcaggccacttctcctccctcctctctaaatgtagtcccctctcctccatctaaaggcaacattccttacccattagtctcagaaattgtcttaagcaacagccccaaatgctggctgcccccagccaagcattggggccgccatcctgcctggcactggctgatgggcacctctgttggttccatcagccagagctctgccaaaggccccgcagtccctctcccaggaggaccctagaggcaattaaatgatgtcctgttccattggcaaaaaaaaaaaaaagg

SEQ ID NO: 214 - DNA, 3175 bp, Homo sapiens
  misc_feature: Template ID: 332263.1
  unsure 1854-1892: a, t, c, g, or other
cctcactggaagcagatgctgataccatacttcttgtacagtctggagaactgccaaagaagccctcgaaaatactgaagttcctgttggctgtcttatggtctacaacaatgaagttgtagggaaggggagaaatgaagttaaccaaaccaaaaatgctactcgacatgcagaaatggtggccatcgatcaggtcctcgattggtgtcgtcaaagtggcaagagtccctctgaagtatttgaacacactgtgttgtatgtcactgtggagccgtgcattatgtgtgcagctgctctccgcctgatgaaaatcccgctggttgtatatggctgtcagaatgaacgatttggtggttgtggctctgttctaaatattgcctctgctgacctaccaaacactgggagaccatttcagtgtatccctggatatcgggctgaggaagcagtggaaatgttaaagaccttctacaaacaagaaaatccaaatgcaccaaaatcgaaagttcggaaaaaggaatgtcagaaatcttgaacatgttctgatgaaagaaccaagtgacccaaagtgacctggacaagattcatagactgaaagctgttgacatcgttgaatcatatgtttatatattgtttttaatctgcaggaaaatggtgtctctcatcatttgctctgttaagggaacaaattagcactttttagaagtctgacaattgtaaacagttattagcttttccagaagctgattcccattttaagatgggggaaaattaaggtttgaggttttagaaattagcaagtagtgcatacccttctagccacaagtgcccagtccaggaaagtgctgacttcttagagaatgtgtggccagacccagggacctggagtgtgtttggactgcagtttgccaccctgagaacaccttctccaggactggcatttcagaatcagattcttcattttttgcagctacgatgttcttccagggcactgggggctgtgacttctctctaaattgtatataagttgtgtatatagagaccataattatatggtccttagaaaagactttgcttttataaagcatttagaaaaaatgcatacttttaaaacaagtgcttgagttgtcacttaaaaattatagcatattgctataataaaaccttatttatgtcttatttgaagatgaatagtcttaaaagataaagacataaatgggacaattgttattgagcaaaaaaccaaattatcccaccctcatggagcttatattctagcaaggggagatggatatgatagattacacagtttattggaggacaataagagttatggcaaaaagcaaaaggaacacagggtaaaggggataggtgccatttggtggtgagaatgctgactgaaaaatagaatgatcaatttaatctgaaacaaatggttatttcttttataatccatataataaatttaaaatctaaaatgtaaaattttgaacacaacactggaaagggtatccacagcaggaagtccccagttcacctccatgactacagggcagctttgcacagccctctgggcgcactgtgtgcctctgcccagaagggggcctcgccgttccaccagaagctcagctccaggccctggaggggctgctgctcctcagttgcatttcttcagtagattcatttccttgatgcaaagcatctgtatttgttggttctgtcatttgagcgatgtctctgacttgtttgttttgaattacattacaggctggaatgtaattgtggtgaaagtatttttatattgctgagagtagcagctaatcacagttacatgcttcagaggacttataattgctnnnnnnnnnnnnnnnnnnnnnnnnnnnnnnnnnnnnnnnaactgcatttgaaaagttttatggagaatatgcatgattttaaatctgtgataatgttacatgcaccttcaatttcatccactttaaaaattatcttctcattgaattttagtgcttctactagtttgttcctttttgcagttggtcgtaattcatttctggcttcttatgctttcctgcaagcagatttcattgcatttattgtgttcatatcattttcttggggattatttgtaggacaaccaacctggagttttgcctctctagagtaccacccagtaagtctggctgagcatcttatgtccagtaggttcttggtaaacatttgctaaatgaaattactgattgaaatttggggaaaagtgaataagaagactatctaggacaaaaagccaaagccgaaaatagtatatgagcattctagcccagagactgtcgctactaaaagaatgaaggaaataataaagtgatagacagggaaggatagaaaagacttaacaatatacatatgttccgtctttgctgttttggagaatgatggataagtagtgtttcctgattctgaagcatagctgaacaatttaattgtggtttaccatctttttggttccctcttcagtaattaacctatcgaaaatctgtcctaaatgtttggactggggcacagttccctccatcgctttgggagaaaatcattaatatggcatactgcagattggagggcaggaccactgagggtgtcatagacattagctctatggaattctgctagcaatttccaagtgacagtgaggaattatggatatatgttgaggtcattcagcttcctgagtaccacattccccagctacttagacacgggttaaaatattaagatgtcctagttcaacagcttgaattccattgattgatactgatagtgcctgtccaagacaccagctgaaagacttgttttgtgtacgaaatagttctgaaagtggtgagatacaaaaaggttttagaatcactgccctgttgagagaaattagggggaaatgattacatttagaagctgctagagttatccagtgtttgctggtctttgcaacaaactgtggagaatgggtggtatgtaatgctttggtaggcttcaatcactgataaaagatcatgttaaaatatctttgtgctttcttgttacttggcacaaccatctcttcctgtgttgtatttggagtatcatggagagaaaatagatggccagagcttcagtgtaggcaagaactcttaatttttctataaac

SEQ ID NO: 215 - DNA, 2330 bp, Homo sapiens
  misc_feature: Template ID: 255824.34
  unsure 2171: a, t, c, g, or other
cacccaggccccaacagagcccccctggccacacgtcccagtcagcgctcagcctgggagcacagagcactgtgctggactgtgggccacggctgcctgtagaagtggggccatctctgtcctcccccagctcgggctgcggggaggggagcatcagcgtgggggagaacgtgtcagacgtggctcccacccaaccatggtggcccaacaccccgggagacagtgtctctgaagaactaggtcagagtagggtggctggtggtcaggagtgggactgtgggacgcacagagcctgggaggtaggcgggcagtggggttggtggcatgtgaagttcccctcaggcctcctcgtcagccaggacctgggctgctgtgggggacatgggaggggctgcttgagccagggccggctcggctctgtacccgccacaggcactcggccctgatgccctcgtgtccacttgtgtccacacaggccctgggaggagcggggacgctgaggacctctctccaaattggcctctcaactcacaggaagacacagctgcccagagcagcccaggccgtggtgaggaggcggaggcatcggcggcggaggctcagggtggggagcaggcctacctggcaggcctggcagggcagtaccacttggagcggtacccggacagttacgagtccatgtccgagccgcccattgctcatcttttgcgccccgtgcttccccgggccttcgccttccccgtggaacccccaggtccagtctgccgctgatgagactgctgtgcagctgagcgagttgctacgctgcccgtgctcatgaagcgctccatcacggcaccgctggccgcccacatctccttggtgaacaaggccgctgtcgactacttcttcgtggagctgcacctggaggcgcactatgaggcactgcggcacttcctgctgatggaggacggcgagttcgcccagtccctcagcgacctgctctttgagaagcttggagctgggcaaacgcccggagagctgctcaacccgctggtgctgaactctgtgctgagcaaggccctgcagtgcagcctgcatggggacaccccgcacgcctccaacctctccctcgctctcaagtacctgcccgaggtgtttgcccccaacgccccggatgtgctgagctgcctggagctcaggtggactggcctctcaacattgtcatcaccgagggcttgcctgagcaagtacagcggcgtcttctccttcctgctgcagctgaagctcatgatgtgggcgctcaaggacgtctgcttccacctcaagcgcacagccctgctgagccacatggccggctctgtgcagttccgtcagctgcagctgttcaagcacgagatgcagcatttcgtgaaggtcatccagggctacatcgccaaccagatcctgcacgtcacctggtgcgagttcagggccaggttggccaccgtgggcgacctggaggagatccagcgtgcgcacgcagagtacctgcacaaggccgtcttcaggtgaggcctgggcagcggctgcgtccctgtggtcacggctcagcccacccagcagcactgcttccccccaggggcctgctcacggagaaggcggcgcccgtcatgaacgtcatccacagcatcttcagcctcgtgctcaagttccgcagccagctcatctcccaggcctgggggccccctgggggcccgcggggtgcagagcaccccaactttgcactcatgcagcagtcctacaacaccttcaagtactactcccactttctcttcaaagtggtgaccaagctggtgaaccgcggctaccagccccacctggaggactttctgctgcgcatcaacttcaacaactactaccaggacgcctgaggctgctctgcgggggacgtgcacaataaagttctgctgcccagagcgggggcttactgctgtaggagcgctgcctgccgtccgccccgtcggcttccgtggcctcggcgtctgtggcggcccccgcctcgcagtggtaaggggtctccagtagtttcagcacccgccgcacctggaggatcaggagggtgagaggggtctggggccgacccccctcccagggaccacagggacaggcgtgtgcttgcctctgagaagtccccgcgctcggcagcctcnatggcattctgcgcgatgtagttcctcagcacgtacttcgggttgttggcgtgcatcacgcgcacgtgctcagcctgccaggcggcagcgtccccagcgccttccaggtccttgtccagccgggctctgtacgcctgtagccagtcagcccagtggccc

SEQ ID NO: 216 - DNA, 1926 bp, Homo sapiens
  misc_feature: Template ID: 1095059.19
ggccagtgcaagctaaaattaaccctcactaaagggaataagcttgcggccgcggctccggggaacggccgcgcatcggcgccccggctgcttctgctctttctggttccgctgctgtgggccccggctgcggtccgggccggcccagatgaagaccttagccaccggaacaaagaaccgccggcgccggcccagcagctgcagccgcagcctgtggctgtgcagggccccgagccggcccgggtcgagaaaatatttacaccagcagctccagttcataccaataaagaagatcctgctacccaaactaatttgggatttatccatgcatttgtcgctgccatatcagttattattgtatctgaattgggtgataagacattttttatagcagccatcatggcaatgcgctataaccgcctgaccgtgctggctggtgcaatgcttgccttgggactaatgacatgcttgtcagttttgtttggctatgccaccacagtcatccccagggtctatacatactatgtttcaactgtattatttgccatttttggcattagaatgcttcgggaaggcttaaagatgagccctgatgagggtcaagaggaactggaagaagttcaagctgaattaaagaagaaagatgaagaatttcaacgaaccaaacttttaaatggaccgggagatgttgaaacgggtacaagcataacagtacctcagaaaaagtggttgcattttatttcacccatttttgttcaagctcttacattaacattcttagcagaatggggtgatcgctctcaactaactacaattgtattggcagctagagaggacccctatggtgtagccgtgggtggaactgtggggcactgcctgtgcacgggattggcagtaattggaggaagaatgatagcacagaaaatctctgtcagaactgtgacaatcataggaggcatcgtttttttggcgtttgcattttctgcactatttataagccctgattctggtttttaacaagctgtttgttcatctatatttagtttaaaataggtagtattatctttctgtacatagtgtacattacaactaaaagtgatggaaaaatactgtattttgtagcactgattttgtgagtttgacccattattatgtctgagatataatcattgattctatttgtaacaaggagttttaaaagaaacctgacttctaagtgtgggtttttcttctctccaacataattatgttaatatggtcctcatttttcttttggtgcagaaccgttgtgcagtggggtctaccatgcaattttctttcagcactgacccctttttaaggaatacaaattttctccttcatcacttaggtgttttaagatgtttaccttaaagtttttcttggggaaagaatgaattaatttctatttcttaaaacatttccctgagccagtaaacagtagtttaatcattggtcttttcaaaactaggtgtttaaaaaaagagacatatatgatattgctgttatatcaataacatggcacaacaagaactgtctgccaggtcattcttcctcttttttttttaattgggtaggacacccaatataaaaacagtcaatatttgacaatgtggaattaccaaattaaaagagaatactatgaatgtattcatattttttctatattgaataaacaatgtaacatagataacaatataaataaaagtggtatgaccagtgcttgtttttccttgtgtgtcatataaaattatcagtattgataggccaatttctaaagctgatgtaaaaacactaacatattaaatatttgagatatgcctaaagtagctaaacaggagccaggcattgttcgaaagcattgtcacccttacagttctgtgaggtagtaggtactaatataaggtt

SEQ ID NO: 217 - DNA, 1924 bp, Homo sapiens
  misc_feature: Template ID: 902753.4
gtccttagaccctcccaaccgccgggtccccgccgctcggcggagtgttgtagagcctcgagcctgcgaggagcgcgccgcccgccagctccctgcgtcccgtcccgcgtccccgcgttcccgcgtcctgcgatccgccgccatggccagtgaggagctggcgtgcaagctggagcgccggctgcggcgcgaggaggccgaggagagtggcccccagctggctcccctcggcgccccagccccggagcccaagcccgagcccgagcctcccgcccgtgcgcccacggccagcgccgacgcggagctgagcgcccagctgagccggcggctggacatcaacgagggcgctgcgcggccccggcgctgcagggtcttcaacccctacacggagttcccggagttcagccgccgcctcatcaaggacctggagagcatgttcaaactgtatgacgctgggcgggatggcttcatcgacctgatggagctgaagctgatgatggagaagctgggggccccccagacccacctgggcctgaagagcatgatcaaggaggtggatgaggacttcgatggcaagctcagcttccgggagttcctgctcattttccacaaggccgcggcaggggagctgcaggaggacagtgggctgatggcgctggcaaagctttctgagatcgatgtggccctggagggtgtcaaaggtgccaagaacttctttgaagccaaggtccaagccttgtcatcggccagtaagtttgaagcagagttgaaagctgagcaagatgagcggaagcgggaggaggaggagaggcggctccgccaggcagccttccagaaactcaaggccaacttcaatacatagtcctgctgaccttgccctctgcccacagctgtgcctcacagatgccccgagaagagatgactaggcatcttcatcactgctgtcggtcccctccctgagccagcatctccatccaccaccccgtgccagctcccgtgccagccttcattcctcccagtgtccaagcccctccaggagggtcctggggtgggccagatgcctgcccacctctgtctcctgcctctgctcctctgcccttcttatagccagaacttgtatcttctcagcaaccttcactttgtccttgtccctttaccattccccatcaaagagtagtctgctatatcaatttgtgtagatatgtctgtctttttgggtcctcagagaaaatgcccattttctcggagaattctctgcactcctctctgcttcacattcaacttccctgttctcatctttggtaggattctgccagttgcttttgcatcttctgttcctgggtaatggtgggtcttaatggaggctgggtggaccactgcccgtccactcttcaacaggaggaacagcatgccaccacagtaacacacattagagaaaggacagaggtctgctccttcctgccacctttctcctggccccttagcattcccccagtccctccctcttcaccttgctccgtctatgtcttcccagctcagccttttccccactcttaaatactgtactacttcactgtaagaacgaaagaatagttaggataccaatgagtaaaagggttcctgttcactctgactctgtgcaaattgtattacagtagaccgctgacgttcccaagtgacagatccagggcctttcaaacatccccaaagtcatggccatactcaccattagccagtttctaacatctgtttcagggtatccagctgtagatgttcttatcccccatacttgtgagttcttggggttgctcacaaatactaggggtttttgttgtatttttaacaaatatatcctaatgtcatatttattctcttttgtaactgctgtctttacaataaagaaatcatctgcctttctaatctt

SEQ ID NO: 218 - DNA, 1203 bp, Homo sapiens
  misc_feature: Template ID: 232259.1
  unsure 436, 586-673, 679: a, t, c, g, or other
agaaaccatcactgaggaagcgctgacagcagacttactagacagtaactttaaaacaactgtttgaaagatgctgaaggagctaaaggaaaacaaagacaggagaacagtatatgaacaaaatgagaatatcaataaatagaaattttataaaggaagcaaattctggaactataaaaagtacaataactgaaatgaaaaattccctaaagggttcaaaatatttaagcaggtagaagaaccactcaatgagcttgaagatagggcaattgaaactgttgaatctggggaatcaaaagaaaaaaaatgaagaaagtaaatgaaaacctaaggaacctacctatggaatgccataaatgagaccagaagtagagaggcaagggcagaaagtatatttaaagaaagttcaacagaaaactgctcatatttgattaanaaaaaaatgtatctacaaacccaattagcataacaaactctggataggataagctcaaggaaacacacaccaagacacttcattgaagacaaaagaaaaccttgaaagcagcaagagagaagtaatttatcacatacaagagattctcannnnnnnnnnnnnnnnnnnnnnnnnnnnnnnnnnnnnnnnnnnnnnnnnnnnnnnnnnnnnnnnnnnnnnnnnnnnnnnnnnnnnnnnttaganttctacatctaacaactgtcctttagaaatgaggaagaaattaataccttcccagattaaaagctgagggagttcattatcattctttgcaagaaatgctagaaggagtctttcaggttgaaacgctgaacactataaacttctttaaaagaacactaagcatcttacaacttgaagttgtaagaagaaatagagatctccagtaaaggtaaatacatggacagttataaaatctagtatattctaatgatggtttgtaactctttttattttctacatgattaaaaagacagatccattaacaactgctaatattgggtgcacaacgtataaagatgtaatttgtgatgtcagtaacagtaagggagacagcagtacaggagcagagttctgtatgttattcaaattaggttgatataaattcgatttaggttgttgtaatgttaggatgtcaagtgtaatccccgtgtcactataaaaaatgaactaaacaccaaaggccagtaatggaggaaatgaggaac

SEQ ID NO: 219 - DNA, 2242 bp, Homo sapiens
  misc_feature: Template ID: 330879.1
gtcaaattgcattgaatatattagaagagaatttattctatgattctggaataggaagagacaaatttcaacatgatgttcaaactcttctgcttacaagacagcgcaaggtgtatggagatgaaacagacactctgttttccccattaatggaagctttacagaataaagacattgaaaaggtcttgagtgcaggaagtagacgattcccacaaaatgcattcatttgtcaagccttagcaagacatttctacattaaagagaaggactttaacacagctctggactgggcacgtcaggccaaaatgaaagcacctaaaaattcctatatttcagatacactaggtcaagtctacaaaagtgaaatcaaatggtggttggatgggaacaaaaactgtaggagcattactgttaatgacctaacacatctcctagaagctgcggaaaaagcctcaagagctttcaaagaatcccaaaggcaaactgatagtaaaaactatgaaaccgagaactggtcaccacagaagtcccagagacgatatgacatgtataacacagcttgtttcttgggtgaaatagaagttggtctttacactatccagattcttcagctcactccctttttccacaaagaaaatgaattagccaaataacatatggtgcaatttttatcaggaaagtggaccattcctcctgatcccagaaatgaatgttatttggctcttagcaagttcacatcccacctaaaaaatttacaatcagatctgaaaaggtgctttgacttttttattgattatatggttcttctgaaaatgaggtatacccaaaaagaaattgcagaaatcatgttaagcaagaaagtcagtcgttgtttcaggaaatacacagaacttttctgtcatttggatccatgtctattacaaagtaaagagagtcaattactccaggaggagaattgcaggaaaaagctagaagctctgagagcagataggtttgctggactcttggaatatcttaatccaaactacaaagatgctaccaccatggaaagtatagtgaatgaatatgccttcctactgcagcaaaactcaaaaaagcccatgacaaatgagaaacaaaattccattttggccaacattattctgagttgtctaaagcccaactccaagttaattcaaccacttaccacgctaaaaaaacaactccgagaggtcttgcaatttgtaggactaagtcatcaatatccaggtccttatttcttggcctgcctcctgttctggccagaaaatcaagagctagatcaagattccaaactaatagaaaagtatgtttcatccttaaatagatccttcaggggacagtacaagcgcatgtgcaggtccaagcaggcaagcacacttttctatctgggcaaaaggaagggtctaaacagtattgttcacaaggccaaaatagagcagtactttgataaagcacaaaatacaaattccctctggcacagtggggatgtgtggaaaaaaaatgaagtcaaagacctcctgcgtcgtctaactggtcaggctgaaggcaagctaatctctgtagaatatggaacagaggaaaaaataaaaataccagtaatatctgtttattcaggtccactcagaagtggtaggaacatagaaagagtgtctttctacctaggattttccattgaaggccctctggcatatgatatagaagtaatttaagacaatacatcacctgtagttcaaatatgtttatttatatctttatgattttattctctctctctattctcatggcactttcataacattatggctaacctctaattacagattttgcttttgcctccctgaatgaattacaagcctttttaagatatgaaatatgcctacccgcagagcttggcacaaagtggagtcaatcttttaatgttttaaatatgcattttcagactcaaataattaagaagtttcattgatatccactggtcacatcataactgtctatagggcaataaaatctgtgttaaactcaattgcttttataagttttctaaattatttcttcactgtgacagcaaagatttaaataagatgaatgtaaaagagaaagcttattggactcaaacccacagatccacaccagagttctatttacctcatcttggtatcaataaaaacttatgtggaaggtaaatatattgttccccatccaccacataacactctcccca

SEQ ID NO: 220 - DNA, 1788 bp, Homo sapiens
  misc_feature: Template ID: 370489.34
ctgcgctcgggccgtgcgcggcggccgtgcgggcacgccatggacttcaacatgaagaagctggcgtcggacgcgggcatcttcttcacccgggcggtgcagttcacggaggagaaatttggccaggctgagaagactgagcttgatgcccactttgaaaaccttctggcccgggcagacagcaccaagaactggacagagaagatcttgaggcagacagaggtgctgctgcagcccaaccccagtgcccgagtggaggagttcctgtatgagaagctggacaggaaggtcccctcaagggtcaccaacggggagctgctggctcagtacatggcagacgcggccagtgagctggggccgaccaccccctatgggaagacactgatcaaggtggcagaagctgaaaagcaactgggagccgcggagagggattttatccacacggcctccatcagcttcctcacacccttgcgcaacttcctggagggggactggaagaccatctcgaaggagaggcggctcctccaaaaccggcgtctggacttggatgcctgcaaagcgaggctgaagaaggccaaggctgcagaagccaaagccacgacggtgcctgactttcaggagactagacctcgtaattacattctctcggccagcgcctccgcgctctggaatgatgaagtggacaaggccgagcaggagctccgcgtggcccagacagagtttgaccggcaagcagaagtgacccgtctcttgctggagggaatcagtagcactcacgtgaaccacctgcgctgcctccacgagttcgtcaagtctcagacaacctactacgcacagtgctaccgccacatgctggacttgcagaagcagctgggcagctcccagggtgccatatttcccggcaccttcgtgggcaccacagagcccgcctccccacccctgagcagcacctcacccaccactgctgcggccactatgcctgtggtgccctctgtggccagcctggcccctccgggggaggcctcgctctgcctggaagaggtggccccccctgccagtgggacccgcaaagctcgggtgctctatgactacgaggcagccgacagcagtgagctggccctgctggctgatgagctcatcactgtctacagcctgcctggcatggaccctgactggctcattggcgagagaggcaacaagaagggcaaggtccctgtcacctacttggaactgctcagctaggcaggtgcccccatcccccccgcattctggcctaggcaggagaggatgggcgcagccctgccacttaacttgtttgttggtgacacagttgttcagagtggggagaattcaccccattctgtccctgcccctagtcacctagctgtgagggtgcctgaggctgaatggctccacccctcccccagccctgcttctgacctgtggctctggagcccctgcccctgcctgcatccccgagcaccccaccctccaggctccactaaggagggaggggctgtctgcagcagctgcactcagcacctaggccagggtggggccgccgcagatgggctcaggaagccccaggtgcactcagcgagagccctgcctttcagttgccaaaagctgcatcaggggaatgcggcaaggcacacagggctctggcagcccctggggactgggcgctgcccctgggaggggagagcctggccagggctggtgttgggcccggagcagcatcttccggtgctatcctcccctcccacccctcacagctcaagccaagtc

SEQ ID NO: 221 - DNA, 2220 bp, Homo sapiens
  misc_feature: Template ID: 233007.5
  unsure 85: a, t, c, g, or other
gacagtgttccacgggcgctgcttcctgcctgggtttggagttgtcaccactttcccctctgccgtctcctgcgggcgcaatggnggaggaggatgaggaagcgcgggcgctcctggcaggcggccctgacgaggccgacagaggtgccccggccgcccctggagccctgccggccctctgcgaccccagtcgcctggcgcaccggcttttggtgctgttactgatgtgcttccttgggctttggcagctatttttgctatgataatcctgctgcccttcagactcaagttaaacgagatatgcaagtgaataccacgaaattcatgctgctgtatgcctggtattcttggcccaatgtagttttgtgtttctttggtggctttttgatagaccgagtatttggaatacgatggggcacaatcatttttagctgctttgtttgcattggacaggttgtttttgccctgggtggaatatttaatgctttttggctgatggaatttggaagatttgtatttgggattggtggcgagtccttagcagttgcccagaatacatatgctgtgagctggtttaaaggcaaagaattaaacctggtgtttggacttcaacttagcatggctagaattggaagtacagtaaacatgaacctcatgggatggctgtattctaagattgaagctttgttaggttctgctggtcacacaaccctcgggatcacacttatgattgggggtataacgtgtattctttcactaatctgtgccttggctcttgcctacttggatcagagagcagagagaatccttcataaagaacaaggaaaaacaggtgaagttattaaattaactgatgtaaaggacttctccttacccctgtggcttatatttatcatctgtgtctgctattatgttgctgtgttcccttttattggacttgggaaagttttctttacagagaaatttggattttcttcccaggcagcaagtgcaattaacagtgttgtatatgtcatatcagctcccatgtccccggtgtttgggctcctggtggataaaacagggaagaacatcatctgggttctttgcgcagtagcagccactcttgtgtcccacatgatgctggcctttacgatgtggaacccttggattgctatgtgtcttctgggactctcctactcattgcttgcctgtgcattgtggccaatggtggcatttgtagttcctgaacatcagctgggaactgcatatggcttcatgcagtccattcagaatcttgggttggccatcatttccatcattgctggtatgatactggattctcgggggtatttgtttttggaagtgttcttcattgcctgtgtttctttgtcacttttatctgtggtcttactctatttggtgaatcgtgcccagggtgggaacctaaattattctgcaagacaaagggaagaaataaaattttcccatactgaatgagaagttaaaatgaatgtgtcatgagaatgggcttaacacatcgttggtttgaaaacttccatttttaaaaatttagagtttagtcattagaaaaaataatggactggaaagttatatttatatccaaatatacctatttcaaagtgtatttgtgaggcctgttttagcctgtgtcttttgtattgtgtgttgctaaagaattctacttttagtaggctaatcaacaatgaaagggttagaaaattgctgtggaacatccaggtgaacttcaggaaagacagtgaaaaatggaaaacgttggagcttctgttgagataatcttcattaggtatatatcttagggatacagccttttctttatcttatagcaggaaaaaaaaacttttgagggaaatagaagggctgcgttacacaaaataaacaatggcattgtcataggccttccttttactagtagggcataatgctagggaatatgtgaagatgtttttatgaagtctctttctgatcacgaacaatagcttgcgctctactctgtagttatgtggattgccgagcaatgacccttttcaatttcttatttctgtgttactgaggaccctaatcacttagggatgtaattttatagtataaactttctgtacagtttttcttatagtctaataagtaaaaagtgtccttcaaattatgataattgcctatgtacatggataaattaaaacactgcacacggaaaaaaaa

SEQ ID NO: 222 - DNA, 1493 bp, Homo sapiens
  misc_feature: Template ID: 422389.9
cgcggatcggacccaagcaggtcggcggcggcggcaggagagcggccgggcgtcagctcctcgacccccgtgtcgggctagtccagcgaggcggacgggcggcgtgggcccatggccaggcccggcatggagcggtggcgcgaccggctggcgctggtgacgggggcctcggggggcatcggcgcggccgtggcccgggccctggtccagcagggactgaaggtggtgggctgcgcccgcactgtgggcaacatcgaggagctggctgctgaatgtaagagtgcaggctaccccgggactttgatcccctacagatgtgacctatcaaatgaagaggacatcctctccatgttctcagctatccgttctcagcacagcggtgtagacatctgcatcaacaatgctggcttggcccggcctgacaccctgctctcaggcagcaccagtggttggaaggacatgttcaatgtgaacgtgctggccctcagcatctgcacacgggaagcctaccagtccatgaaggagcggaatgtggacgatgggcacatcattaacatcaatagcatgtctggccaccgagtgttacccctgtctgtgacccacttctatagtgccaccaagtatgccgtcactgcgctgacagagggactgaggcaagagcttcgggaggcccagacccacatccgagccacgtgcatctctccaggtgtggtggagacacaattcgccttcaaactccacgacaaggaccctgagaaggcagctgccacctatgagcaaatgaagtgtctcaaacccgaggatgtggccgaggctgttatctacgtcctcagcacccccgcacacatccagattggagacatccagatgaggcccacggagcaggtgacctagtgactgtgggagctcctccttccctccccacccttcatggcttgcctcctgcctctggattttaggtgttgatttctggatcacgggataccacttcctgtccacaccccgaccaggggctagaaaatttgtttgagatttttatatcatcttgtcaaattgcttcagttgtaaatgtgaaaaatgggctggggaaaggaggtggtgtccctaattgttttacttgttaacttgttcttgtgcccctgggcacttggcctttgtctgctctcagtgtcttccctttgacatgggaaaggagttgtggccaaaatccccatcttcttgcacctcaacgtctgtggctcagggctggggtggcagagggaggccttcaccttatatctgtgttgttatccagggctccagacttcctcctctgcctgccccactgcaccctctcccccttatctatctccttctcggctccccagcccagtcttggcttcttgtcccctcctggggtcatccctccactctgactctgactatggcagcagaacaccagggcctggcccagtggatttcatggtgatcattaaaaaagaaaaatcgcaacc

SEQ ID NO: 223 - DNA, 2789 bp, Homo sapiens
  misc_feature: Template ID: 228814.8
agacattgggttgtattcataaagtatggtacaggcaatgagccaaatcatcagtccattctgtttggttaatgctctgccatctacttaatgcctgtcaaattggaagatatttaaaaagagaagccacaaatggcaccagataaaaaaggaaaactgtttgccactgagggaataagatgcttatttggagaacctgtggttaataatgaaggaaaagaaatgatcatgctagcttttaaagatcagaaacacttaacgctttgcctttgttagaagggaagttaggattcacttagagtagcattaatagagttatgtgttatgaaaggtcttagtgtctgttactgaaaggttcaggattctgtcctgaccttcatgtattcatacagaggtgttgataataatggaggtcagttacgtgaaaaaccgttagaggtcactcatttcttaatgactgctctttgtcagggtcagtcgaggatttaccaaaactggttctgatttgtcttcagtatggtgaggagtaataaaatgcttctttgtaatgttagtacacattatatggtcaacttacaggaagcacttggataaactggtggctatgtagcctgttgttattatttattgcctagaaaccactcttaaccctaaatgattatctttgcagatccacagtgatcgatcaaaagagggactgaatgggagtgggtgaatggatcggtgcaaatccattaccactgctggagaaaccaccctggaaccctaaacatggttcactctcatgttatttttcctttgatcagcttttgtggaaaaacaggacagagatgtttttgtgtccttgatttttgatgtgatttttttttcagcactaaagaagaatttaaatacaaaatagaatgttatatatcttgtagacagtcaaatatttgatgttttatgggacataatcatttgggaagtttttgttgtaaatgaagagttagtttgttgctattaatttgtttgacacataagttcattcctaaaagttagagatgttacataaagaagggttgaggactttatttcagaagtcatttaattttttctttattttctttcagattttgtatggtttattcagaagtgccaaatttcagtgaacccaacccagattatcgaggacagcagaacaaaggggcacagagtgaacagaagaataattccatgaatagtaatatgggtacaggtacatttggaccagtgggaaatggtgttcacactggccctgaatcaagggaacaccagttttcacatgctggcagaagcaatggccggggacttataaatccacaactacaaggaacagctagtaatcaaacagtgatgaccacaataagtaatggcagggaccctcggagagcctttaaaagatgacctatgctaaatactcatgtgtagtttttatactacatgccctacttgaacacttattgcacttttatttattgttaactgtgaaaagtacgtcctttattgggtttccttttatattcttggtttgttaagaagaatggtttgtttttatagcaaaactgttaagctgctcgagtctcctgttgaagaatgggaacactgaaaagtaggggcatttatttttagagtaaaaagattattggatagcctttaaaaaacctgcacccatttcatgggtgagttacttaagacatcagctttatagcctctatgagtctatcttctgtataagttttgtaatatttaacataaggcttaatgggagatgttcttttgtcttgtattcagatattgccaactaaagcaataaccatcaaaaaacacaagaacttgtcaatgctagcagtaatttttgagtgtttgtggctctcggaatgattgacttcgttcagtgactactattaagattttccaaggactgactcatcccaaatttttgttgtattaccaaaaaaacagattccttatcagaatttggaatagaatgtgatctctattgcaacaagtaattttaaaagaaagctacatttattttagagtagtgctcctaacatgtattatcaactttgtggattacattggaggaaaatttaaaactggggccttgaatatttattttttgaaactaccatgttaaatactgaagtataatttgggggagttataaagttatgataaacattcatctgattattttaaacaatagttgtggtagataaacatactggaggtgagtcaaattgaattcatatagtaacatgcagtctgaagtcctagttacttaataggtactcagcctggagtgaaaatcctgggtactgactttgagaggagtgagtgtgcatgttgtcaaagtttctgaacacagttcacatagccttattagcaaaagttttaagaaatggctctatcaaagaagcaattgcagctttattcagaaatataaaagtggaatttatgtacatgtcataagtggtacccacttcccctttttactgtagggtggataactcttaggatttaactctttgaatattatctcttgaataaagcatgtgttaatgttaacaaacctacgtaatttttgccctttcaatgacttacagtggagagccagtacatcttaactactgttgtagtgatggtatcaacctcatggttacttagctctgcatttgttgctttgttttttttccacttcaaatcacaaaataagtagatttcgttttctgaaaactccatagcatttgaatacaaaaagttgtgcc

SEQ ID NO: 224 - DNA, 722 bp, Homo sapiens
  misc_feature: Template ID: 228814.10
ttttttaaagatttttcctaggtcattaaaggttataatgttaagaaacgtttcccaaacctttcagagctctgttacatcctatttcctgataattactcagcacaccacaaagtgcaaaatggcacatatatctagtagatgacacctcagatacatatcctcacaaaacatacaataaaaattaagtatccttttaaaaattatcttctttatactaagtatcaacagggctagcctaatcatagaattataacacagtcaaaattagcctaatcataaaagtatactacacaattacccctttgttctgctgtcctcgataatctgggttgggttcactgaaatttggcacttctgaataaaccatacaaaatctgaaagaaaataaagaaaaaattaaatgacttctgaaataaagtcctcaacccttctttatgtaacatctctaacttttaggaatgaacttatgtgtcaaacaaattaatagcaacaaactaactcttcatttacaacaaaaacttcccaaatgattatgtcccataaaacatcaaatatttgactgtctacaagatatataacattctattttgtatttaaattcttctttagtgctgaaaaaaaaatcacatcaaaaatcaaggacacaaaaacatctctgtcctgtttttccacaaaagctgatcaaaggaaaaataacatgagagtgaaccatgtttagg

SEQ ID NO: 225 - DNA, 3360 bp, Homo sapiens
  misc_feature: Template ID: 234169.3
  unsure 345: a, t, c, g, or other
gcggccgcggcgcttccgatcgcgacgcggcttctggcccggaggcgccgatgcagccgggctggcccgagaacctgagcaagctgaagagcctcctgacccagctccgcgccgaggacttgaacatcgccccgcgcaaggccacactgcagcctctgtctgcccaacctgccgccagtcacctacatgcatatctacgagacggacggcttcagctagggcgatgttcctgctcaagagcggcacgtccatcccgctgcacgaccacccgggcatgcacggcatcgtcaaggtgctgtacggcaccgtgcgcatgagctgcatggacaagctagacgcggccgncgggcaacggccgcgggccttgccgcccgagcagcagttcgagccgccgctgcagccccgggagcgagaagccgtgcggccgggcgtgctgcgttcgcgggccgagtacaccgaggccagcggcccctgcatcctcacaccgcaccgggacaacctgcaccagatcgacgccgtggaagggcctgccgccttcctggacatcctggccccgccctacgacccggacgatggccgggactgccactattaccgggtgctggagccggtcaggcccaaggaggcctccagctcggcctgtgacctgcctcgagaggtgtggctcctggagaccccacaggccgatgacttctggtgcgagggagaaccctatccaggtcccaaggtcttcccttgaagccactggcgcccaggagcggtgggccgaagacgtgccctaccctaccacaagggctgtgtctctaccccctagcctgggcgttggatctactggaatgagcagcagccgcttcctcggcagccttgggaagcacgggcgactggacagcagccgccgggcacggttatgggggcggggtgggcggggaggctagattgtttcctggtactgtcactgccactggggctttgatttggaggaatggggcaggggactatctgaagcgcttccatcctaaagccataatgaaaatatcttcctctcttccccattctatacaaaatactaagtggttttcttgctcccactccctaccccttagttaaatagggtttattttccactcatgcccttatgcctttttttcttatagttttttaacttattgactgtgcatgacccagtggtttgaattgtttttagttcaagtcattggtaaaaactaggtttaaggagatgagctactgtttaaagtgagctggcctgcctaattaattccttgtgaaaactaaatgattttttcagtttggggatcattctcacaacataactatgcatgtagaggacaagatttattttcttttctccctttgcccagtagccacatctggtttactcaggcagcatctactaagaaattcagcacctgcatatctctgtgacatggtcacttagagcttatcttccctatgaatctccagatctgtgagtcgagcagatttcatgttgcagattcacctttaatgcaaagactgtattatcctcacatgactttttttcttgtcttactgtaccttaaaaggtgatagagtaattctgtattttctaacgggaagattcaaaggagctgaatgtgttatgcttccaaacaactgaatgtaaaacactcctagccagctgttgcattccctatatttatttacttccaatattttactgtaaaagtagggagaaatattatgttgatagttgtttcatattctctcaggaactttaatgttcccgactcgggtgattccagctgtgttgctggcagtgttgtctcaaccctctccctaaaatgactgagccctgggttcatctaatgtggttttccttaggaagagatagaaggcacagaagatcacagctagagaattgagaattaactatactactagccattttagggcaccaaaacttgggattaaacacttcctacttcccactcccaactcctgaaatgaagtcttgctatctgtgactagttttatttttgtgcttttaatagtccgagcagtcttaccttgtttacacatgtattgacaccatttgcttcaggccatggagcactgtttctccctttttactatttataggattccgttttttcacaagacttttaataaaaagaaattgtagaaataaacacattaaaatttgcccagctgtcgtctaagccctcttgattgacttgcccaagtggcaatagagttctaatatctataataaagggagatttgctattattagtggaatgttgaccccgtatgtagagaaacagtacgtgcctttgcctctttatgcacacagagacccagggtgagggagtatttgttcccagtttttaagatagtataaaaaagcaaatacttggtgagtgatttaaaaataaaaccaaaacaaaacacaaaaagatattccacaggacatgccactttattataaaacctgacacaggcatagtaccaagtatttcctgcattgttgctaaaattgttttattgtagctccacattctggtgtagtttaaaatgcctttgggggcagtttgaagcagttcttcatgccacttagtttgaaaataaaattctagatatgcaaatgattttcttagaaaacttcacaaaataaaagatcttgtttttttttccatagcacagtaatgaatgtggttatcaatcacatacttttttggattatattgtagcaaaaagttgattagcttaccaagattattaatagcaatgtatgtgttataatacaacttagtacattaaagctacgaaaactcatcctggctgtaggatagtaataaaggaagaattatgacttcattatgaaaaaaagaagttttaaagttttcaattacgagcaatttggaagaaaaaacctaaggtgcttttcaaaagagtaactgaaattgttgcaggccaaaacagcaatatgatatctcagatttagttcaataagaacagtgaaacttttggttcactaataaattctgagtaaattagtggtgaagacaaaatataacttgttttagtgagccactgaggaaagaatatgcttattacaaagacaaaatgtggtgcagaaactatcttgcacctgtgtgcataaactgttagtcgtgactgacttggtgtgttgctattgtgtttctatatactccgtccaatatagataatgttttaataacaactgtgggataaaagttatcttccccttggaaagactaatgagcacaatgatattaatcacttttatggtgaataataaatgcaataattgcctcatgggtgagaaattgtctgtcc

SEQ ID NO: 226 - DNA, 1990 bp, Homo sapiens
  misc_feature: Template ID: 403676.1
  unsure 1611, 1959: a, t, c, g, or other
gttaaggatgttttcatttatgtttattggtgacactggtgtatggcactcttttcctgtgagtcttgctgtgactttgatatgagggtaatgccagttctgtaaatgggctggaaagtcttccctcctctcttcttgtctgaaagagctttcaaaatatttgatagaattcaccagtgaagatatctgggctttggcatttctttttgagaaggtttttcaatttctgacttagttcacagttctcttcaggttttccagttaatttgggtcagttttggcaatttctatctctgcacgaattggtcctttttatccaagtggtctaacttattggcttcaggtttttcagagtattcacttataatgttttttaacttcctaagggtcattagtgataatctctcttttgttcacaattttggtaatttatcttatttctcataatctcttttttcactgttggtcaagaaaacagacagaggcagcagatggagatgtgacagattctctagtgggaaggctttgatcataatacctggcaagccagaatgatgccagcaaccccaaaggagctgccaatggatcttgacaggaaaatcactgactctggattgggctatgctcaaccaggggtagatgtcaatgcttcaagggctatacaagaaccagaaaagaagagattgcaccaatttggactgccgagtcacacttctttacacaagaaaacacactttacagcctcaaatggccaacaatgcagagggacatgtcctcctcaggggaaaatttgatagaaaattgaaatggtcaattgaaacattgtttgtctaaaaactgccaatctaattgttgggcaatataaacatgaaggactggcttttatatcttcatgaatgtgctcgctgtcaacatgagtggggctgcaagaataactccactaggtagcatcctctcttttacctgatggatcaggacgatgctgttatgacgatacatacaattcttctgaagaggagaggatgctggaataaagactacacttcacctcaaatttattttttcatatgttatgccatagtaccaggaatagggatgtaaataaaagtgccagaaacaggaattatccctaagcgaaaaaccataactatatttttatacctttatgtaagaattctcaagtattcatttcatctggaaaagttaggattaacagtaagtagagttatatagcctggtggtctgatagcccccactagttccttacctatataacctaccctctatgatcaagactagactgagggaagacatgctagaatactattgctgcctgcagtctaggccagcccagcagacaaacctaatgtcactcccaaacctggaaacaactgatataaagggacagagggaggaatagtggctgagggtaagtgataaatcaaagggttatataatgagaaaattcaatattagcttaactcctcaaaggtggtgtgagcaagagaagatattgtcacttaggtcaattatacgggatgcctaaaagagtgaagctgtatgtccctgagaccatccttgtttttggaacctggtaagattgagtgttgntcagcaaagctgagtgatttcattctgggagacatattcatacaagaggatgataaactggcctaattttgaatgaatggatgagactctgataatatgccaatacctctttactgttacaatcctttttcctgtaaaagatatgtggtcaaagaaaagtgggcaatctgagttatcacaaaaacatttagtctttgtccctggtttctcctaaaaaccttagactctcttgagtgataagagtgtctttagagtactgatgagaagactcttggctgagtggatcctggatatcttaagaacggtggctagctgccagagacacatacctgtgatgcgagggttatntttttccattttgtgttgctataaagaaatg

SEQ ID NO: 227 - DNA, 2938 bp, Homo sapiens
  misc_feature: Template ID: 231546.1
  unsure 342-376: a, t, c, g, or other
tgacactacgcgcagtgctcggttgtttacaatcagtggggaaaagggcagaaccagtgcccggccccacactgcctctgtggcctggactttgaagggaacccactgaacactaattatgagccctgtctttcccccagaatgcctccctgggtttcacaaacagccttgaggttggccctcctcaaggtcagccttcagatttgggagcaaacttcagagaaggcagaggaagatacattgccttgctgtgggctgcctcttctttcctcttggtgtgcgaagtatttcagaaggccattgatgaattccccctctttagctgtgtatttgtgcacgtgnnnnnnnnnnnnnnnnnnnnnnnnnnnnnnnnnnnaagtaacagaccagactccttttctcttctgtcccgtcaccaggctcttgcttcactgcagatacagttcactctgaaagctggttgaaggagagcagcaaaaatgtatcaggggttttgcttctgtgtttcgccaaagctcataagggctgtgacccacccatatggccccagttttttctgtctcttctgttccaaagccaggagagctgacttccaggtgaagggatgggaaaagtggactctcattgtagtgactcccaacctacctaataatttgttaacttaggaatatgctatcattgttgacttgttcttccttaggagaaggacgattttcacccaccctttctgttctatggtggactcttaacaggtgctatgtgaccaggaatctagccgggagtagcagaggccctgtcttctgaagtctcaggcttagaagttaccaaagtgggctcagaaactgtcatctcctggttccaagttcgggctctggcagcccagccgctatcttagctgtctttcccagcggtgctaagagtggtctcagtgagaaggtagatgccaactggagggccagacctgtgtcctgcccatgtcctccttggtggacgtttctgtttactcagagctgctagagaccatcctgcccatccgagttctgagattgggactgtgatgttgggacctgaggactggatggtagaatactggggtcccccagctcttagcaggatgcaggctattgcttccacacccctggccgtgagaacgtggtatgtaggagagttggctgtagctttaggatttctggaagccaatttggcatggcctatttgatctctggcttgtgctcctgctacactgacagactgattgcgtggctctttcagaagacccaggaagggcagctccagccagaggaccttcctggctatgcaggtgcacagctcttaggcatcaagcaaagggtcagccagtcagtagtagtgggaggaagcccttcctcctcttatgcaagcagctcgcagccagcccagaatctcttatgcagcccaaagggcttcttgaggtagagagccctccccagtgtcttcccaggataagtagaaatatgatcacagagcaacggagcaaaggctttcgggagtgtgaggctgcatctgctggagcaaagggaaaccgtgggcttttccggccagatactcttgagctctgtgaccctgctcctgtcaccccaatttctccaagccagaggtagctttctcagagccccttggtggttctgtcctccaaatgctgctgttgggagcgggcttccagctctcagtgggcagtgcacctcctcctaaatgcaggcacttgctaggaagagtgtgagctggcgtcttctgttcaccctgcctagcagttgtcaccattcacaagtggcattatttatgttgtgctgctgtccagctgctaagatcccttcatctgcacaagccctggctagatatgtgtgaatgtgtggcatcatttcacttcagccgcccaattccatctctcctctgcagccagattcactggctgatgctcactgctcactgtctatccccacgaaatttagttttatcagtagtcttaaagtgttgatctcaaacaagtacattagaaaaatcatgtttcttctctctcatcttacttttctcttctcagatttctcccttcctagaacattctctctgtttagcactaatgttcacctcgtattttttggaagtgcaaaaatctcaatttgtgtctgtttacagctctctctcctcactgctcacagcaaggggttctgtatcagtggatttcattttgtagctgctgagatgttaaggcaagcctcagcatctgcccctgctgggtgcacaatgctgcttcctcgaagagaagacacagagtccaagtggcaggacttgaggttggcttccactctgccttagaagttaattttccaaagtacattacaaatctctgaggccattaggggaaaaggaaggggtgtggtttgtctttgaaattacggttaatacttttagacagtaagtccggctggttgcagggctatttgccccgacagcatcagcctgtaacatttcttctctttcctttgtgccactgagtcgttccctggccagaggacataaatggtgctggtaggaggttatcagagtaaggaaggtagcagatataggtgcagggtgcctgtcattcactgtgttatttggtttaaatcaaagtgattctgggggaagctatgctctttcagtggataataaaattggtaactctattgtaaaacatgtcaatggtgtgtgaagaaaaatcaaccaatctgtaggtgttgataactagacagtactgtgtatgttacgtgcctgtgtggatgtgcacttccagcatggtatgtgtagcgatgtggatcatgccagagttcgtagatcctgttttggggtttgcacatggatcgtatgttaagctttttcttttcaataaatgaattttatttttatttttgagaggttgcta

SEQ ID NO: 228 - DNA, 854 bp, Homo sapiens
  misc_feature: Template ID: 247544.1
atgagccactgcgcccggccctcatgtagctttaaatgtatgatctgacttctgctccccgatctctgtttctctggaggaagccaaggacaagagcagttgctgtggctgggactctgccttttaggggagcccgtgtatctctttgggatcctgaaagggggcaggaaaggctggggtcccagtccaccctaatggtatctgagtgtcctagggcttcagttttcccacctgtccaatgggaccctttctgtcctcaccctacaaggggcacaaagggatgacaccaaacctggcaggaacttttcacgcaatcaagggaaggaaaggcattcctggcagagggaacagcatgccaagcgtgagaaggctcagagtaaggaggttaagagcccaagtattggagcctacagttttgccccttccatgcagtgtgacagtgggcaagttcctttccctctctgggtctcagttctgtcccctgcaaaatggtcagagcttaccccttggctgtgcagggtcaactttctgactggtgagagggattctcatgcaggttaagcttctgctgctcctcctcacctgcaaagcttttctgccacttttgcctccttggaaaactcttatccatctctcaaaactccagctaccacatccttgcagccttccctcatatacccccactactactgtagccctgtccttccctccagccccactctggccctggggctggggaagtgtctgtgtccagctgtctcccctgacctcagggttccttgggggctgggctgaggcctcagtacagagggggctctggaaatgtttgttgactgaataaaggaattcagtgg

SEQ ID NO: 229 - DNA, 2153 bp, Homo sapiens
  misc_feature: Template ID: 237320.1
agaagatgtacttacaatgcagtgggtggttttaactctataacctttgggctctgtggttggtgctccccttcctaaataaatgaggtgtatgcagggccctcttctgccttagcgccctgccagctgggactccagcaaggcccggggcacctgaggacagagtgagatggagggccgctgctccagcagccgggcctgcatcccacaagtcaactgtgtcggacagaggatccttacaaagaagaggcagcagggttgggggctggccagctgctcgtccgccctaggtagcttgctcatctgtaaagtgggtggggcaggagttcccacctcatggggtcctggcaagcctgcagtatccccgagtggcaccagcctgcttctggggcagagcagtttgtgccccctgaggtaccactgatcctctttccctgctattaggtattgctctctccctccggtgtttgccttttcagattatagaagtaatatgtgttcccatatttggcgtctctcaggagctcaggaagtacttggctgagtgaacatgtccattgtggaaaaatggcaacaatatggattccatgggtatattttatagaagaatatgaagaaaagcagctacccctaaacccattgcacaagctgttcatgttaattctgtacccgacgctttccccacggggcctcccctcactctgaaatggcatccaggtccatcttgccctccacctctgcatggctctccatgccccatcgcctctcccagatcctagcactgggtccacactctcgccctgtccatttaggttgatgaaagcaggcagtcacccgggtgggccagtcttgcctgtgggaggaacatgcagtctcctgtctcatggtttgaagtgtgccaggaagcctggcccagcccacctccccctggagtccttcccaggaggaataaccccttaggtcattgactataagatgagttcgctcactggatccttcctctctgatgagacaggaagaaggtacacagtgaccaggtaggaggaggagagggagtagaaaggagggatgcgggtggctggtccctgcatttgcctgcttccctgcacgggtgtcccactggccgcctctgctcaccagtgtcatgggattctctcagaagatgaaaacagcccctgcttttttgctagaatggctgagctttcatggaaaggaagctggacccaagcaacagccgactaccgaaggttgcctggagcagtgcagatgtgggaggaagaagggccttggtgcacactggcttttcttcctgactgcaatgtggcattgtgccagctacctcctctttctcggcctcaggaaaatggagagaaagcagccctgaaggtggctgtgacgagggaaggggcagagggcctgacagtcaaccacgcgctatattttcctgttcttccttagggcaagaactgcatggccagactcaggcaaggcctaggtgtgggctgggcattgcctacacgtgaagagatcactccgcgtccctactgcacctgtcacaaagtgccttctgatatgcctggcaaaccaaaatcggtgagcgccagcttgcttccctagaagacatttctaaatattcataacatgcttgctcaaatcaatcaccttattttacatccgctccagggagaaatgaagacatggtcctacgttgttctgtaattattttctatgtaaattttgttccttgtcacaattatatatgtcttaggggaaaggaccatttcacatgtgtcacctcatgtgattctcaccacagccctgtgattgctcctgttttataaataatgacatagttccagttgatggccaaagccacagctaacgagaggcagagagagctcaggctcccaggagcttccactctcagaccttgcctcccgggctgccctgagtgaaacccctgcttagcatttggcacagccagaagcagcaagctagggtcacaacacagagaggggctgtgtaatactggctgcctctgtgctaagaaaaaaaaaaaatcactgtgtgtttgtttattttggtgcaggcccagtgttcttgcttagacttaatactacccttcatgttaaaataaaaccaaacaaaaaccc

SEQ ID NO: 230 - DNA, 2646 bp, Homo sapiens
  misc_feature: Template ID: 983197.1
  unsure 899-916: a, t, c, g, or other
aactcgggcacatccttctgtttcttcttcagctctatcctgctttcctcatcccttctgacaccacgtcctcactcacctgcacaagaatccctgcatcaggttctcctttgagggtacccacccaggacagtcccctaccacttctgtcttgggctgaagttgcccacgtccacaaaatctgtactcccagcgggggtgtttggcccgaggagtcagtgttattactggtggatgcaccgtgtccacagcagcccccaatcccagcgatgcgtcagatcttacgtggcttcctgctgggggagatggccttcacccacgggatgccgggttctcctttctttcctcaccccaacctttactccaccagagaaacttccttttgaactcagtggggaagagggtgatgagacaggactagaaagtagtgggggacccagcgagtggacgccctgctccgggattcctgagtctgtaaatagtgtgcccagcagctgtgaactccccttatagcctcaggctgcagtgtccttcccagctgtgtgagaaaatgaaagccgacgtccacagggacccaggcagggttgggtgttgtgactcactccacctctgtgccctgcagaggtactgttgggtccttgtcttgtgagcctggggtgagctctctgtacatgttgttgttccacgtatgggttgacttggcatgctggggggtcctcgttcactctctgaagttggcctcctttcactggggattgaaaagcacctccacccctaccctagtgatgtcccctgaggacccaggtgatagtacagtcaatattgtcagtactttgctttgattgaaggctgtagagctgagttaccaaaatttctatttcaaaggaaaccaaaccttnnnnnnnnnnnnnnnnnnctgggctgggtcttccaaacctaccatgaaaccctggtgtgcaggctgcactcaatgacctcaacccaacacctccctgagtgtgcttcttggaagagcctagaagattcctggatggagaccccattggttcagcctcaagtctggcccgtcttcgaaaaaacaaacacatttgtaagctttgtgggagcttccaggcctgctctaagatgccttgcttgtcctttgacccatcagcatggagctcagtggttgctgtttggttctgcaggctggtggggaggccgcccatcgtggtggggcatctgtccagccccattgccactcagggcatccaaacaggaggcacccgctgggaagggtctaaagatactccttgtggccactgctactgttcacacttgacttgtggagaagcgaagggctgaggggaggtttgtgtacacccatgtatttaaaagtgactgactgactgaaatgagcacataccgacatatgcaacatactaataccttcctgattttcgagactttctaattactacaactaacctgttgtgctcacctctggaattcagaaagagagccactggcgagcactgaccacaagggctgccttaggaaggaaatgtgtgctttcaggagttcttattaggggaattttaagagcacaaaaattttattgaacccaccttagtgacaaacagaaaatgatttgttagattgtcagttggaaggggtttattatgactgctggtgaaataaacagtgaccagtttctgccaacatttatggaaataacgtttctaggttttaaatgtgagccgtaaactgaagctacttcagttaaaaaaaaaaaaatcaatacttaaactgtagggaaaaggtggattggtgccagagaaaacattatttaatagtgtcagaacatggaactgcaacacagtttgtagcaaggcactgagaaaaacccacaactaatccttcatcgcagctgtctgaactcttgatcatctgccatcccccaaacagtgacttctttttttctggtgactccaggcctgaatgacctagtgtggagagtttaaactatgtacaagggaggaaagaaaaaaaggaaaggaaccttaagtaagcctcagccaaaggttttatgcattggacttcctgtgcctgcccccaggggcaagactgatccccatgcctgtgcccatgacatctccctgaaagaggacaccatgacagcccggctttgccttgactgacccactgctaccccagaaataagaatcaagagcagctattgttatccttagagtgttttccgtctagggccggctcgtgaacagccacatatccttgcacctgacactgtccccacacaaatagctggctttcgttgcttgttgaatgaatgagtgagttggctctatatccccttggagctggccggtaagatattagtgcctcattttacaagaagagaataggaaggaattaagcaatttggccaacagatacaagatagattccagagttttatctcccactttagggtggcagccagtaggccaaactccaaagaccgttgctgatgtctttttctgcctcccctctttgggttagtgtggtatgtacaagctcactcttgttgaaaattagaaaatagttgaaaacaaaagggttttgtttttctttttaaatcacattaaatgttttacattgctaaaa

SEQ ID NO: 231 - DNA, 1545 bp, Homo sapiens
  misc_feature: Template ID: 481455.4
gtttttttccctcactcctatttatttaattaaaaaattagggaagttgttcattcacagctgtatattaatataaaatctctttataaaatgattcagagaaaaggcagtaatggtcacttactgtgctaaaatacctttttttctaaaaatatttaagctttagggtttgtcatagttgtgtaacaatttacgttaactagaaaaattagatatataataagttttggtactaagaaacatttacattctacactcattagtcaaatgaacttttctttcccagtgctaacagattttgtttcatgtgaagaaaaataaaatacaaatgaaataaaagtctagaaacagcaacaggaaactcaccacagaaataaagacataacccttgataagtttgtgtaagtgccagaattattggaagcaggtgacgaatgattaagaaaagctttattgtggggacatgctttaagaatcagctctgtatttgtgccaaggagatcaggtattggtgtgcaaacagatcccattaatactctgatttgaaccatgaattccacctactctgcgttgaagccctccagtagactgatagatgtaatcaaatgatcagctaccaagtttaattcctttgcctgtgtgtagcaacagttggtagttttacaagttaagttgatggtctggctgcagataagagaaagactcagtgataggtggtttgtgagtgaagtaacttccacactgtcaagagttgacagcatattaattgtgtggcattataattgtgagaaacaaatgagagcaaaatgttaggtcctttgacaagcattttcctcctgtttttaaaaagggctttaagttgtttcctatgtaaggtaatctttcttttttagtattatctaagaaggatggtagattatgtcattttggaaactattgtgtcccttgtattttaaatatttcaggaaaatgcctacgattgttacaaagatgtgtgttttacttataacataagctctgattctccagtggccactgggccttctctgtgctctgtattcaactgcagtatgaattacagaatgctgtgcatgttcgttagtaccaataccatgtgtatgtggtagaagttgtaaccagtttctggatctgtatggtactataaaatacttattttataattctgtaaccgtatggcagtgttatgccaaaaatgtataaagagcaatagtttttgttgcttactgctgtattttaaaatattgtttctaaaataatagagttagagttccttttgagtaattatttttaagaactattgccaaatatacatcctgtaaaactaataaaagccactccatcttagataacattttagcattgtgctagagtacattatggtgattttgcacgattaaaatatttttaaagaactagaaaaaatgacttgctgttttcctgtcattaagcatgtattttttatgattaacacataagactaacattattttcttttatcctcaaaaataaatattgtgaagggtg

SEQ ID NO: 232 - DNA, 2064 bp, Homo sapiens
  misc_feature: Template ID: 481455.6
  unsure 1939: a, t, c, g, or other
acatctaccagtctttaatgtctgtttggggtgagtggcgatcctctgttgtaggaatgtttttgaagatttctattttgttttccacttaggaaattcccctctctcatttggggtatatgcgttgagtataaggtaggctgtatttagacacactagaatcattaaatgtaggtgaagttgtagagaaaaatggcctgggtcaatgtaggatctagaaaattaggagtgtacatttgctggcttctttttgagttttgtactgtttattacaggaacatatttgtgtggctaatctctagggtgacagtgagtactaccctgctccttctgcattctagttatccaacacacccagcagattgtgttcagggacagaatgtgtttttagaaatcccttattattgaaatgaataataatatagctataaatatgaatgtctggaggtatccagatgtgccttaacaaatgtaaatggttttcattcagaagtttacatttttattacattataaaatctcatcattgggaactttctaaaccatgaatatcagttcttttaatgaaatttaggtggtgctttatcattttggagaagttgctgtttgggacaatagcatcagtttatcaagaagtgtactcaccatgatattcaacaatgtgttacatttgacaaaacgtgtttagagtaagaaagactaactatactgtctgttatatttatttatgctttttgtagtttagctacatactataattttcattttaaacgttccttagttactacaaataatatttatgttttgcttcttcttagatgtaggcggatgcagaaatagaattatgttagagaaattattaaaagtttaattccagtaggcagttggagaaatctgaaactaatttgaaaaacttttatgctgtagtgctcattagaatcattttaaaagcactgttgcttgcatttttcctagactacagagagtgttctttgtcattttttttcctattctgttgtgaagtttattgtttcagttatttgagggaaataacctcttaatatgtttattttcctgaactaaagttttcatgtagagaatacaattaaatgttttgtgttatgacccaaactggctggaagtagagttcagagagggagaagggacaagaatcagtgtgggcatctcaggaaagtggcgccagtgctgggctccagccttctccactggcatgatgggtcctcagattctcctctggataatgagggtgttgggcactgtgagctctgacttctggggaggataggccatcatggactccatacacaattttgatgggtatcagttctcataaaatacctgctacaatttatttattttgtagttgtttagaaaactgtgagcagttgggcattagtaaattgtagttatatcttaacgatcttgggaatcattgaaatatgagtttttttccctcactcctatttatttaattaaaaaattagggaagttgttcattcacagctgtatattaatataaaatctctttataaaatgattcagagaaaaggcagtagtggtcacttactgtgctaaaatacctttttctctaaaaatatttaagctttagggtttgtcatagttttactttttaaattatactttgtgtaacaatttacgttaactagaaaaattagatatataataagttttggtactaagaaacatttacattctacactcattagtcaaatgaacttttctttcccagtgctaacagattttgtttcatgtgaagaaaaataaaatacaaatgaaataaaagtctagaaacagcaacaggaaactcaccacagaaataaagacataacccttgataagtttgtgtaagtgccagaattattggaagcaggtgacgaatgattaagaaaagctttantgtggggacatgctttaagaatcagctctgtatttgtgccaaggagatcaggtattggtgtgcaaacagatcccattaatactctgatttgaaccatgaattccacctactctgcgttgaagccc

SEQ ID NO: 233 - DNA, 1296 bp, Homo sapiens
  misc_feature: Template ID: 237733.2
ggagagagatgaggactaggtacaggctttagaggagagccaccgccccggacttctccctctggtcaccccgctttccatgaccctccttgcctgactttgtgactccttgcctcgctatcaaaacaagtgctgcaatctcagtgctttccaagagccctgcattgttagaaacttcccagcacgcagcaaaggctgctgcaatactcgctctgcctgcctttgccctgcgcttcctacttaccctccttttgtttctcccaaacatctgtccctgactatgctcatctcatgtttgtcctcagctgctgaaagggccacgtttgctttcattacaaataagaccaccgagtgggctcctggcgtgggggcgggagcagccgcgcgcagtcttcagaggcagccccccaggctgtctctggagggtgtgtctctgcttccctttccccgtgtttattttcagacgaagccaagtggcccggggggaccctccggactcccagccttcagagaggagggcagctcgggctttcgccgcagtgcttcctgcccgtcacgtgtgtgctcctagccggggtcgggggagctggtatcttggcccttctgggaggacgcgcacagcccgaggaggcagagccccagacgggaatgggcttttcagaggtggggtgcgggcgaggggacgatgcattatttttaatatttgatttatttttccaactggacttcttcccggggctctttctgggcccagctgcctttgtgatcccgcgccccggtcctcggcctctcacctccagcgccggggcgccccctgctgtcggaagcggctgtgaccgggcagaggtgctatctgggactctgggttctcagcccggggacagcgaaccgaggggcagatgatccatcagaaaagagccggcactgcccagccccgcgcccctgcccctgcctttttccgggagcgcgccgcgccgcacccgctacggccgcttgaccccatctttgagcccggccccaagctctgggaccgtcgtgcccctcatcaaggaagagccaaggaccccaaggagaagagaaaggagttcatgaaggcagaaatgcctggggcccacgaacatcccagtgtggccctggacgggacatcatgctgggcaacacagctaaaatgcgggtgaagaccagatttcttgcacatggcggtgacgggatgctccctagagagcttcaagtggattctttgctttttattttctctcttaataaaaatgtatgatgtttacattgtcagagaac

SEQ ID NO: 234 - DNA, 390 bp, Homo sapiens
  misc_feature: Template ID: 040151.2
gagaaggtgctttagtctgaagatggcggcctcagcagcgcgaggtgctgcggcgctgcgtagaagtatcaatcagccggttgcttttgtgagaagaattccttggactgcggcgtcgagtcagctgaaagaacactttgcacagttcggccatgtcagaaggtgcattttaccttttgacaaggagactggctttcacagaggtttgggttgggttcagttttcttcagaagaaggacttcggaatgcactacaacaggaaaatcatattatagatggagtaaaggtccaggttcacactagaaggccaaaacttccgcaaacatctgatgatgaaaagaaagatttttgagactgcagcctattaataaagttaacataactgagaaa

SEQ ID NO: 235 - DNA, 740 bp, Homo sapiens
  misc_feature: Template ID: 425448.2
tttgagagtctgcaggtttccttttaatcaaggctctactgaaggtgttttgtggggctaaaagcccccaaaacatgaaatggacatgtaacaccacctggatcccccatagcaggccagaccactctggcgagcactgctggtctgcccaaatctgggtaatcagactgggtattcattggctgcatttcaaagcacagcactgctttcagccaggatgaagtgggagtgaacccagctgctagcagagctgccactccaggctgagagccaagtaccagccactgccagtgaagactggcccctttactgaagggagttgttcagagtccagccaccggccctggggagggagagaagtcagggtattctgctcggggatggtcagggctccgcagctccatcgccagcatcctttggaaagccgcctctggcggagacagccggctgggggggcgctccaggtttggctgagacgttctagttggaacagaaaggaaaaaagtgaggctgggaggcaaggccttggattaggccccacaaggatgtggccatttggcatttggatagtattaactttttcgaaacctctcaccagatcaaaggaggttagggataaagcggcggagacatacttcccccctccagggtaagctagggcttggccagcctagccagtgggcagaccccaccccaccccagcccagcccagggtgggcactaaccccgccaccagccgg

SEQ ID NO: 236 - DNA, 742 bp, Homo sapiens
  misc_feature: Template ID: 012712.1
gagaaattaagatgtttttacactaaggagaagttgtaaaaaatactgatttggaatctctgtaagtgacttctgtttttttgtagagtcacctaggctgtgtggaatacaatgtggttagaatcttttaaactaaaataactcagtatattgtttattaaactttctagggaaatgggcagattactctgaatattccttttccttctgcttttctttttatcttaaaaaggagtaaattgcatggatgactggaagtggcgagttggtatttattatttgaatcaacagtaaaaattttttggacatagtgtgaaaatccttatttaagtaattagggcagaattcttgtcaattaaaaaaaaatctccaatggcaaagtagagcctgtaaagaaggagttaggaataataactacattcaagatgaaagatgaagaacaactgtaaagattccttgaaggctaagatctacccaaaactgaggtccaccaaaggaagaattcaggaatggacaaggtattttttccataataggatgaataaatgtgataaacttaccaagataagcctaccaagcacaggcctcctagatattaggcttatctgtacagggctttatacatgcagataagtactatattttcttaaattgatttctaagagttatgattaataaaagcctcttacagtatatactaaaacgtggtccaagttaggaagatagttaagtcctggacctg

SEQ ID NO: 237 - DNA, 1090 bp, Homo sapiens
  misc_feature: Template ID: 009707.3
gctggtcgcgcccagctgcgtcaccccaggaactggggtgctgtgggccagtgtggccgtctctacgaagactggcacgacccctaaagttaggtcggaagacctgtgggcagcttgagcgccgaggagtgccctgaacgctcaactcgccctggaaacgtttttccgtacagcaacatggcggcgcccatggactcttagaaaaggagaaagctttttctctgtggactggaaggggcatttttcatgatcactatttagatgggtgctgttttcatgaggagagtctgggaaggcggcgtccgcttttctgacaagggaagaggctactttgtccttttaaggattcaatgacttcctgacttggaggatgtggacctagtggctagacccaaggaccaaagcaagaagtcgtggggggcccaggaagacaggaggatcacattgggattccagacataagatcaggttttaaccccctttggccaaattttggctgaaaatgttgaattatcaactctgaaattaaaaagaaagtttatattaaaacattgcaattttccttagaatttctgtatatattaacatcatgaatgataaattctcttcaatgtgcatgtcaggtttttgtacttgtatatcaaatctatctgtgtgtatgaagtgtatgtttattgaaatacaagatatttaagaagctgatctggaaagttggattttcattctagttcctaattcccagaggcttttttaaaggaagggaatgtctgtggtacaccagttgtcagctgggtggttactggatcatctttcttttatcaacaagataaactatcaacttcaccagcatcatgaaccttgttgccgtaaaaaggagttcactacttctgttcactttgagtctcttcaaatggattctgtgtcctcctctggagtctgtgctgcatttattgcttctgactcttccactaagccagagaatgatgatggaggaaattatgaaatgttcacacgaaaatttgtttttcgacctgaactgtttgatgtcaccaaaccttatataactccagctgttcataaagaatgccag

SEQ ID NO: 238 - DNA, 441 bp, Homo sapiens
  misc_feature: Template ID: 019751.1
tcaaaaagctcttctgctactctcttttatgatcttgatttacatcaacaattgtcttattcatgatggccagtgacaggacaatgactttctcaaaggtgtccctttatttttggccagtagagatgttttgtgtgtcagcttcatcacagagcaagatggaaaaatataggcctcatcagtctcatgccaaccagaatgggccttcaacttatggtgctggtttgattgaatggaccactgcatgagtggtcggtgtctgggttactggattttctcttctggttatgagtcactgtttttttctcaatgttaaaatgagtgaagaccatgactctaaacctgtgaccttcgcagaaggaaaacattgttactgttgccatcggtattatttggcatctacaaagtcatagaacaaaaacttgcatacattttctccct

SEQ ID NO: 239 - DNA, 496 bp, Homo sapiens
  misc_feature: Template ID: 065689.1
  unsure 187, 313, 317, 432, 468, 471: a, t, c, g, or other
tcccagactgctctcctcaagggagagctgggaacggtgggatgtacagggtgttaggtaaggaggggaggtgggcggtcagcctgggcgggacttgcccgagctggcaccccatgtgcacgtggagagaacttggcctctggcctccagggtcctccctggcctctccttggtggggatggttgtnagccatggcagcccctgctgagtgcactgttgggtagagtggggatgtgactctcagagccgctccctggtatcggagcaggccctggacctgcttctgtgaagtgcacggttaggaatggggcgntccntgattgtattaggcattgtagaggggcttgtcctgaggggtttgtgttcccatattactggcctgtgggtgctattttaggtgttactggggtgattctctgctgggcctgtttnaggggtgtgtctggtccatcggggtgaagaacaggncanttcgtggtggaggttcatgctgtgt

SEQ ID NO: 240 - DNA, 805 bp, Homo sapiens
  misc_feature: Template ID: 279164.6
ataatttaaggaattctttctccccgctgagataaagaggggtattttaaaaatagctttaaaatctatgaaacatggacactgaccacttattttcatccccacagaaggaaggacagagtaaatgaacttaaattgttgcaagagagtttattcatctttgaagaaaagattattgatactgcagtaggccaccaagaacaagagggtgctctgtgggaccagcctgggtgggcagaagggtagaaggaaaaggggaggagtctcccaggtgctcacaccacatcctcctcccgtgtcccagatatccgtgatcaacgggaccagcccctttgcctatgactacgacctcacccatattgttgctgcctaccaggagaggaacggtgagtcacaggtagagcccattcagccgctgctcaggactttcaaggttagtgggggcaacagagacaagcagaactggaacccttgtgatgaaaatgtcaaaacccgtgaatgctcaacgatgggagcaaatatgctgtccaggatttgtctttttcgtcctgatcttcagacctgggaccgcccccacccctccagcatcccatggtccagcaggctagtgatggttaaatgccatcattatcccaccactggcttagtgggtttctcttttaaaaaatataagcctaattgagttgttccccataccacacctataacagatgccaaagacaaattgctgttcatgcttttcagagaaaaacagagaacgtgggtgactctccccacattagcagtccagcaggagaacaggagt

SEQ ID NO: 241 - DNA, 434 bp, Homo sapiens
  misc_feature: Template ID: 428329.1
ataggggtgaagttgaatcagagggacacagagcaaggtactcttccacttgatttgcacatgcattactgtggcacctgtattcccattgtaaggcccatccctgaatacatgacattttctttcagagaatttccttccttgtttttcacttatcaacataatggtaatcactgtgaacaaaggtgattctgagatccctgattttgtttttatacttttccacagatcgggatgcttacccttaagtagctgtgtcaaactaggcaaatgggcatatgtccaggtaactgtggtacctgaaggcaaatgacacagtaaatatgagcaaagaatatggacaggagagcaaccatataaatgaagaagtacttgctaggatccatgactactatttgagaaataaaataattactttagaccccatagttatg

SEQ ID NO: 242 - DNA, 1744 bp, Homo sapiens
  misc_feature: Template ID: 988891.1
  unsure 1563: a, t, c, g, or other
ggtattcaacagagaaatttctcagcctcctacttctgcttttgaaagccataaaaacagcgagggagaaactggcagataccaaacctcttcgaggcacaagggcacaacaggctgctctgggattctcttcagccaatcttcattgctcaagtgtctgaagcagccatggcagaagtacctgagctcgccagtgaaatgatggcttattacagtggcaatgaggatgacttgttctttgaagctgatggccctaaacagatgaagtgctccttccaggacctggacctctgccctctggatggcggcatccagctacgaatctccgaccaccactacagcaagggcttcaggcagggccgcgtcagttgttgtggccatggacaagctgaggaagatgctggttccctgcccacagaccttccaggagaatgacctgagcaccttctttcccttcatctttgaagaagaacctatcttcttcgacacatgggataacgaggcttatgtgcacgatgcacctgtacgatcactgaactgcacgctccgggactcacagcaaaaaagcttggtgatgtctggtccatatgaactgaaagctctccacctccagggacaggatatggagcaacaagtggtgttctccatgtcctttgtacaaggagaagaaagtaatgacaaaatacctgtggccttgggcctcaaggaaaagaatctgtacctgtcctgcgtgttgaaagatgataagcccactctacagctggagagtgtagatcccaaaaattacccaaagaagaagatggaaaagcgatttgtcttcaacaagatagaaatcaataacaagctggaatttgagtctgcccagttccccaactggtacatcagcacctctcaagcagaaaacatgcccgtcttcctgggagggaccaaaggcggccaggatataactgacttcaccatgcaatttgtgtcttcctaaagagagctgtacccagagagtcctgtgctgaatgtggactcaatccctagggctggcagaaagggaacagaaaggtttttgagtacggctatagcctggactttcctgttgtctacaccaatgcccaactgcctgccttagggtagtgctaagaggatctcctgtccatcagccaggacagtcagctctctcctttcagggccaatccccagcccttttgttgagccaggcctctctcacctctcctactcacttaaagcccgcctgacagaaaccacggccacatttggttctaagaaaccctctgtcattcgctcccacattctgatgagcaaccgcttccctatttatttatttatctgtttgtttgttttattcattggtctaatttattcaaagggggcaagaagtagcagtgtctgtaaaagagcctagtttttaatagctatggaatcaattcaatttggactggtgtgctctctttaaatcaagtcctttaattaagactgaaaatatataagctcagattatttaaatgggaatatttataaatgagcaaatatcatactgttcaatggttctgngcttatatattttcagtcttaattaaaggactggtgtgctctctttaaatcaagtcctttaattaagactgaaaatatataagctcagattatttaaatgggaatatttataaatgagcaaatatcatactgttcaatggttcttcagtgaagtttatttcagaaaaaaaaaaaaaagggg

SEQ ID NO: 243 - DNA, 323 bp, Homo sapiens
  misc_feature: Template ID: 988891.13
  unsure 14: a, t, c, g, or other
attttgctagagantgttctaaaaccattgcactttacttacaactcctgtccggaaggtgcgaggcaacaagtttttacagccttcacagaggagtttctggcagcacctgtacgatcactgaactgcacgctccgggactcacagcaaaaaagcttggtgatgtctggtccatatgaactgaaagctctccacctccagggacaggatatggagcaacaagtggtgttctccatgtcctttgtacaaggagaagaaagtaatgacaaaatacctgtggccttgggctcaaggaaaagaatctgtacctgtcctgcgtgttg

SEQ ID NO: 244 - DNA, 767 bp, Homo sapiens
  misc_feature: Template ID: 1327819.1
  unsure 503, 508, 513, 517, 520, 541, 543, 551-552, 557-558: a, t, c, g, or other
aaaaaaagagtattaaataacatacacacaaagacaaatgcaaaagtactaacctgtatggactaggactataggaaaacctggaatttgagcattaaatttggctctgagcttactttcccaccctgaaagttctccaaggaaaatgcttgtgcagctgactgccaacccccccagattcctcacgtcccgcacccttctcattatctggcctgcatctctcctgcttcagcaccttctgactcgtttggcctcctggatgccattctccttgtcatttttcttggactgggtgacccatgtctctccctttccctcagccttccttcagatcaaaccaccctgatcctcatgtttcttcctatctcctagatatttggcatgatcttcagtatgatcttgtgctgtgctatccgcaggaaccgcgagatggtctagagtcagcttacatccctgagcaggaaagtttacccatgaagattggtgggatttttggttgttgntttgntttgnttgntgnttggtggttggttttttgccncnaattttannaatcnntccgcattgctagataaaagctgaagttactttatgtttgtcttttaatgcttcattcaatattgacatttgtagttgagcggggggtttggtttgctttggtttatatttttttcagttgtttgtttttgcttgttatattaagcagaaatcctgcaatgaaaggtactatatttgctagactctagacaagatattgtacataaaag

SEQ ID NO: 245 - DNA, 577 bp, Homo sapiens
  misc_feature: Template ID: 1328161.1
  unsure 186-278: a, t, c, g, or other
catgtctctccctttccctcagccttccttcagatcaaaccaccctgatcctcatgtttcttcctatctcctagatatttggcatgatcttcagtatgatcttgtgctgtgctatccgcaggaaccgcgagatggtctagagtcagcttacatccctgagcaggaaagtttacccatgaagattgnnnnnnnnnnnnnnnnnnnnnnnnnnnnnnnnnnnnnnnnnnnnnnnnnnnnnnnnnnnnnnnnnnnnnnnnnnnnnnnnnnnnnnnnnnnnnaaagctgaagttactttatgtttgtcttttaatgcttcattcaatattgacatttgtagttgagcggggggtttggtttgctttggtttatattttttcagttgtttgtttttgcttgttatattaagcagaaatcctgcaatgaaaggtactatatttgctagactctagacaagatattgtacataaaagaatttttttgtctttaaatagatacaaatgtctatcaactttaatcaagttgtaacttatattgaagacaatttgatacataataaaaaattatgacaatgtcctgg

SEQ ID NO: 246 - DNA, 659 bp, Homo sapiens
  misc_feature: Template ID: 1099039.5
gatcgccgccatcatgggtcgcatgcatgctcccgggtgagctcggggcatcaagccggattgctgggcggggggtgggaggaagacagggagtgtgggcagcgggccgaggggatgatgttctgggctgctctggcactagccgccacctcacctcgagactgcttctctccccaggaagggcctgtcccagtcggctttaccctatcgacgcagcgtccccacttggttgaagttgacatctgacgacgtgaaggagcagatttacaaactggccaagaagggccttactccttcacagatcggtgtaatcctgagagattcacatggtgttgcacaagtacgttttgtgacaggcaataaaattttaagaattcttaagtctaagggacttgctcctgatcttcctgaagatctctaccatttaattaagaaagcagttgctgttcgaaagcatcttgagaggaacagaaaggataaggatgctaaattccgtctgattctaatagagagccggattcaccgtttggctcgatattataagaccaagcgagtcctccctcccaattggaaatatgaatcatctacagcctctgccctggtcgcataaatttgtctgtgtactcaagcaataaaatgattgtttaactaaaaaaaaa

SEQ ID NO: 247 - DNA, 1120 bp, Homo sapiens
  misc_feature: Template ID: 1328423.2
  unsure 12, 27, 33-34, 1070: a, t, c, g, or other
gcatatgattangcttaataaatattntattannaggagaattaaagacctaaaagggaagaagttagactgttctagttctggtactgttgaggcactgatgaggataaatgatcatgcagaggtctcttcataattgaccccaatggagtcatcaagcatttgagcgtcaacgatctcccagtgggccgagcgtggaagaaaccctccgcttggtgaaggcgttccagtatgtagaaacacatggagaagtctgcccagcgaactggacaccggattctcctacgatcaccagcttccaaagagtactttcagaaggtaaatcagtagatcacccatgtgtatctgcaccttctcaactgagagaagaaccacagttgaaacctgcttttatcattttcaagatggttatttgtagaaggcaaggaaccaattatgcttgtattcataagtattactctaaatgttttgtttttgtaattctggctaagaccttttaaacatggttagttgctagtacaaggaatcctttattggtaacatcttggtggctggctagctagtttctacagaacataatttgcctctatagaaggctattcttagatcatgtctcaatggaaacactcttctttcttagccttacttgaatcttgcctataataaagtagagcaacacacattgaaagcttctgatcaacggtcctgaaattttcatcttgaatgtctttgtattaaactgaattttcttttaagctaacaaagatcataattttccatgattagccgtgtaactcctgcaatgaatgtttatgtgattgaagcaaatgtgaatcgtattattttaaaaagtggcagagtgacttaactgatcatgcatgatccctcatccctgaaattgagtttatgtagtcattttacttattttattcattagctaactttgtctatgtatatttctagatattgattagtgtaatcgattataaaggatatttatcaaatccagggattgcattttgaaattataattattttctttgctgaagtatttcattgtaaaacatacnaaataaacatattttaaaacatttgcattttaccaccaaaaaaaaaaaaa

SEQ ID NO: 248 - DNA, 2127 bp, Homo sapiens
  misc_feature: Template ID: 232691.21
cccacttcaacataagggagagctctggacagtttgagcagcattgttagagcctgtggaaaacactttacaactgtgtaactgtcttcatctttacagaggaatagtctacaaaggaagacttgtaacctggagaagagacctgtcatttactccatcctttatagtgatgctacaggacgaagaggaatggataaaaacattggcgagcaactcaataaagcgtatgaagccttccggcaggcatgcatggatagagattctgcagtaaaagaattacagcaaaagactgagaactatgagcagagaatacgtgaacaacaggaacagctgtcacttcaacagactattattgacaagctaaaatctcagttacttcttgtgaattccactcaagataacaattatggctgtgttcctctgcttgaagacagtgaaacaagaaagaataatttgactcttgatcagccacaagataaagtgatttcaggaatagcaagagaaaaactaccaaaggtaagaagacaagaggtttcttctcctagaaaagaaacttcagcaaggagtcttggcagtcctttgctccatgaaaggggtaatatagagaagactttctgggatctgaaagaagaatttcataaaatatgcatgctagcaaaagcacagaaagaccacttaagcaaacttaatataccagacactgcaactgaaacacagtgctctgtgcctatacagtgtacggataaaacagataaacaagaagcgctgtttaagcctcaggctaaagatgatataaatagaggtgcaccatccatcacatctgtcacaccaagaggactgtgcagagatgaggaagacacctcttttgaatcactttctaaattcaatgtcaagtttccacctatggacaatgactcaactttcttacatagcactccagagagacccggcatccttagtcctgccacgtctgaggcagtgtgccaagagaaatttaatatggagttcagagacaacccagggaactttgttaaaacagaagaaactttatttgaaattcagggaattgaccccatagcttcagctatacaaaaccttaaaacaactgacaaaacaaagccctcaaatctcgtaaacacttgtatcaggacaactctggatagagctgcgtgtttgccacctggagaccataatgcattatatgtaaatagcttcccacttctggacccatctgatgcaccttttccctcactcgattccccgggaaaagcaatccgaggaccacagcagcccatttggaagccctttcctaatcaagacagtgactcggtggtactaagtggcacagactcagaactgcatatacctcgagtatgtgaattctgtcaagcagttttcccaccatccattacatccaggggggatttccttcggcatcttaattcacacttcaatggagagacttaagacacatttgaaaacagacatatcaagttctatgtgatgattttgggtttttaatactataaatacttgattgtaaactaaattcaagatcatttataggaaaatctagtttcacagctatttgaatttttttctggatttactatataactcttattttttaaaagatcattctgttctttcaaggagaaataagcctaaaagaagaaaaacaaaaaaaattctgtataaaactgtaatcctttgtattcatgtttacagtgctattactataattcaaaattatgtatgtgacttagagttatataatcataatttatgtttatttcaaatatctaagtttattgcttggatttctagtgagagctgttgaatttggtgatgtcaaatgtttctagggtttttttagtttgtttttattgaaaaatttaattatttatgctataggtgatattctctttgaataaacctataatagaaaatagcagacaacataaacatctttgtaaatatcaaacctaatacatttcttgtccagtgataaaacaactggtagaattatttaaacactttagatttttaaataatatacatggctttaatttttactgtgtgtatagctacatgatgaaattaattaaatattaagaggtacttatg

SEQ ID NO: 249 - DNA, 2206 bp, Homo sapiens
  misc_feature: Template ID: 241888.40
gcggcggtaaatattccagtaaaaaatgacagactgactatatacatcttctttccttcccaaaaccccactaaaatgacaatcgaggaatttttttttaagtataaaactctaagaataaaaataatgggaaggtgacagcagcagataagaggttttaacaaactttcagagacagcagagcacacaagcttctaggacaagagccaggaagaaaccaccggaaggaaccatctcactgtgtgtaaacatgacttccaagctggccgtgggctctcttggcagccttcctgatttctgcagctctgtgtgaaggtgcagttttgccaaggagtgctaaagaacttagatgtcagtgcataaagacatactccaaacctttccaccccaaatttatcaaagaactgagagtgattgagagtggaccacactgcgccaacacagaaattattgtaaagctttctgatggaagagagctctgtctggaccccaaggaaaactgggtgcagagggttgtggagaagtttttgaagagggctgagaattcataaaaaaattcattctctgtggtatccaagaatcagtgaagatgccagtgaaacttcaagcaaatctacttcaacacttcatgtattgtgtgggtctgttgtagggttgccagatgcaatacaagattcctggttaaatttgaatttcagtaaacaatgaatagtttttcattgtaccatgaaatatccagaacatacttatatgtaaagtattatttatttgaatctacaaaaaacaacaaataatttttaaatataaggattttcctagatattgcacgggagaatatacaaatagcaaaattgaggccaagggccaagagaatatccgaactttaatttcaggaattgaatgggtttgctagaatgtgatatttgaagcatcacataaaaatgatgggacaataaattttgccataaagtcaaatttagctggaaatcctggatttttttctgttaaatctggcaaccctagtctgctagccaggatccacaagtccttgttccactgtgccttggtttctcctttatttctaagtggaaaaagtattagccaccatcttacctcacagtgatgttgtgaggacatgtggaagcactttaagttttttcatcataacataaattattttcaagtgtaacttattaacctatttattatttatgtatttatttaagcatcaaatatttgtgcaagaatttggaaaaatagaagatgaatcattgattgaatagttataaagatgttatagtaaatttattttattttagatattaaatgatgttttattagataaatttcaatcagggtttttagattaaacaaacaaacaattgggtacccagttaaattttcatttcagataaacaacaaataattttttagtataagtacattattgtttatctgaaattttaattgaactaacaatcctagtttgatactcccagtcttgtcattgccagctgtgttggtagtgctgtgttgaattacggaataatgagttagaactattaaaacagccaaaactccacagtcaatattagtaatttcttgctggttgaaacttgtttattatgtacaaatagattcttataatattatttaaatgactgcatttttaaatacaaggctttatatttttaactttaagatgtttttatgtgctctccaaattttttttactttgacaacaaattatattttaaatgtttcatatttacttttatatttccatacaatcagaaacatttaaaaaaatttggagagcacataaaaacatcttaaagttaaaaatataaagccttgtatttaaaaatgcagtcatttaaataatattataagaatctatttgtacataataaacaagtttcaaccagcaagaaattactaatattgactgtggagttttggctgttttaatagttctaactcattattccgtaattcaacacagcactaccaacacagctggcaatgacaagactgggagtatcaaactaggattgttagttcaattaaaatttcagataaacaataatgtacttatactaaaaaattatttgttgtttatctgaaatgaaaatttaactgggtacccaattgtttgtttgtttaatctaaaaaccctgattgaaatttagctaataaaacctgt

SEQ ID NO: 250 - DNA, 936 bp, Homo sapiens
  misc_feature: Template ID: 256005.49
cttttcctctggggtttgcaactctctccccagtctcggtcactggcctttggctgtaccacttcccttttcttctcgcctgcacctccctcatctttcctctatgatgacatcgccctggggaagagaagctgagaggaactcctcactcagctagcttcaggagcatgacgtcatctctaccatggaaattccactcactctcctgtgcccccacatttgtcctaggcctcagagtccctataaagagagattcccaagtcagtatcagcacaggacacagctgggttctgaagcttctgagttctgcagcctcacctctgagaaaacctcttttccaccaataccatgaagctctgcgtgactgtcctgtctctcctcatgctagtagctgccttctgctctccagcggctctcagcaccaatgggctcagaccctcccaccgcctgctgcttttcttacaccgcgaggaagcttcctcgcaactttgtggtagattactatgagaccagcagcctctgctcccagccagctgtggtattccaaaccaaaagaagcaagcaagtctgtgctgatcccagtgagacctgggtccaggagtacgtgtatgacctggaactgaactgagctgctcagagacaggaagtcttcagggaaggtcacctgagcccggatgcttctccatgagacacatctcctccatactcaggactcctctccgcagttcctgtcccttctcttaatttaatcttttttatgtgccgtgttattgtattaggtgtcatttccattatttatattagtttagccaaaggataagtgtcccctatggggatggtccactgtcactgtttctctgctgttgcaaatacatggataacacatttgattctgtgtgtcttcataataaactttaaaataaatgccgaaagaga

SEQ ID NO: 251 - DNA, 666 bp, Homo sapiens
  misc_feature: Template ID: 256005.51
gagagagagaactagtctcgagcagctgggttctgaagcttctgagttctgcagcctcacctctgagaaaacctcttttccaccaataccatgaagctctgcgtggactgtcctgtctctcctcatgctagtagctgccttctgctctccagcgctctcagcaccaatgggctcagaccctcccaccgcctgctgcttttcttacaccgcgaggaagcttcctcgcaactttgtggtagattactatgagaccagcagcctctgctcccagccagctgtggtattccaaaccaaaagaagcaagcaagtctgtgctgatcccagtgaatcctgggtccaggagtacgtgtatgacctggaactgaactgagctgctcagagacaggaagtcttcagggaaggtcacctgagcctggatgcttctccatgagccgcatctcctccatactcaggactcctctccgcagttcctgtctcttctcttaatgtaatctcttttatgtgctgtattattgtattaggtgttatttccattatttatattagtttagccaaaggataagtgtcccctatggggatggtccactctcactctttctctgctgttgcaaatacatggataacaccgttaattccatgtgttttcataataaaactttaaataaa

SEQ ID NO: 252 - DNA, 3803 bp, Homo sapiens
  misc_feature: Template ID: 331851.5
tgccgctgcagggggctagagatgcctcgtggggttttccagcagctttccaacttggttttgcaggaacttaacgccaacctgagcaacctaacctcagcgtttgaaaaagcaacagctgagaaaatcaagtgtcagcaagaggccgatgccacgaacagggtgatcttactggcgaacaggctggtcgggggattagcatcggaaaacatccgctgggctgagtctgtggagaacttcaggagccagggggtcacgctgtgtggggacgtcctgctcatctctgccttcgtgtcctacgtgggctacttcaccaagaaataccggaatgagctgatggagaaattctggatcccttacatacataacttaaaggtccccatcccgatcacgaatggcctggatcccttgagcctgctgacagatgacgcggacgtggccacctggaacaaccagggcctccccagcgaccgcatgtccaccgagaatgccaccatcctgggcaacaaccgagcggttggccgctgattcgtggacgcccagctccaaggaatcaagtggatcaaaaacaaatacaggagtgaactgaaagccatccgcctgggacagaagagctacctggatgtcatcgagcaggccatctcggaaggggacacgttgctcattgagaacatcggcgaaaccgtggaccccgtgctggaccctctactgggcaggaacacgattaaaaagggaaagtacattaagatcggtgacaaggaggtggagtaccaccccaagttccgcctgatcctacacaccaagtacttcaacccacactacaagccagagatgcaggctcagtgcaccctcatcaacttcctggtcaccagggatggactcgaggaccaactcttggccgctgtggtggccaaagagcgcccagatctggaacagctgaaggcaaacctcaccaagtcccaaaacgaatttaagattgttctgaaagagctggaagattcgctcctggcccgtctgtcggctgcgtcggggaactttctgggggacacgaccttggtggagaatctggagaccaccaagcacacagccagcgagatcgaggagaaggtggtggaggcaaaaatcacagaagttaaaatcaacgaggcgagagagaactaccgcccggctgcggagagggcatctctgctctacttcatactgaacgatctcaacaaaatcaaccccgtctaccagttctccctcaaggccttcaacgtggtgtttgagaaagccatccagaggaccacccctgccaacgaggtgaagcagcgggtgatcaacctgacggacgagatcacctactccgtctacatgtacacggcccggggactcttcgagagggacaaactcattttcctggcacaagttacgtttcaggtcctgtccatgaagaaggagctgaacccagtggagctggatttcctcctgcggttcccttttaaggccggagtggtctcaccagtggacttcctccagcatcaaggctggggcgggatcaaggccctctcggagatggatgagttcaaaaatctggacagtgacatcgaaggatctgccaagcgctggaaaaagctggtggagtcggaagcccccgagaaggagatcttccccaaggagtggaagaacaagacggccctgcagaagctgtgcatggtgcgctgcctgcggccagatcgcatgacctacgctatcaagaacttcgtggaggaaaagatgggcagcaagttcgtggaaggccggagtgttgagttttctaagtcctacgaggagagcagcccctccacgtcaatcttcttcatcctctccccgggggttgaccccttgaaagacgtggaagccctgggaaaaaaactagggtttaccatagacaatggaaaactccataatgtgtccctggggcagggacaagaggtggtggctgagaacgccctggacgtggctgcagagaaaggacactgggtcattctgcagaatatccacctggtggcccggtggctgggaacactggacaagaagctggagcgctacagcacgggcagccatgaggactaccgggtgttcatcagcgcggagcctgcccccagccccgagacccacatcatcccccagggcattctggagaacgccatcaagatcaccaacgagccccccacgggcatgcacgccaacttgcacaaggccctggacctgttcacccaggacaccctggagatgtgcaccaaggagatggagttcaagtgcatgctcttcgccctgtgctacttccacgctgtggtggcagagaggcgcaagttcggcgcccagggctggaaccggtcgtaccccttcaacaacggggacctcaccatctccatcaacgtgctctacaactacctggaggccaaccccaaggtgccctgggacgatctccgctacctttttggtgaaatcatgtatggcggccacatcacagatgactgggaccgtcggctgtgcaggacctacctggctgaatacatccggacggagatgctggagggagacgtcctgctggcccccggctttcagatcccccccaacctggactacaagggttaccacgaatacatcgatgagaacctgccccctgagagtccctatctgtatggcctgcaccccaacgcagagattggctttctgacggtcacctcagagaagctgttccgcactgtcctggaaatgcagccaaaagagacggactcgggggcaggcacgggagtgtcccgcgaggagaaggtgaaggccgtgctggacgacatcctggagaagattccggagactttcaacatggctgagatcatggcaaaggcagcggaaaagaccccctatgtggtagtcgcctttcaagaatgtgaaagaatgaacatcctgaccaacgaaatgcgccgttcgctcaaggagctgaacctggggctgaagggagaactgaccatcacgaccgacgtggaagatctgtccacggctctcttctatgacaccgtgcctgatacgtgggtggcccgggcctacccctccatgatgggcctggcggcctggtacgcagacctgctgctccgcatcagggaactcgaggcctggacgacagactttgccctgcccaccaccgtgtggctggccggcttcttcaacccccagtcgttcctcacggccatcatgcagtccatggccaggaagaacgagtggcccctggacaagatgtgtctgtctgtcgaggtgaccaagaaaaaccgagaggacatgaccgctcccccacgagagggctcctacgtgtacggactcttcatggaaggggctcgctgggacacccagactggagtcatcgctgaagcgcggctgaaagagctgaccccggccatgcctgtcatcttcatcaaggccattcctgtggaccgcatggagaccaagaacatctatgagtgtcccgtgtacaaaacacgcatccgcggccccacctatgtctggacctttaacttgaagaccaaagagaaggcagcgaagtggatcctggcagccgtggcgctgctcctacaggtttagctcgctcctgcctcacagcccacactccctggggctggaccacaactcagcccttcacctgtgcacctgtgacttattctttacaggaactggtggtggttttttgttctcttaaataatcaggtgctttgtaaccaagcacatcggaaccagagggtggaggttggtgtggaagaggtggggcagattaaagccagtggtgccaa

SEQ ID NO: 253 - DNA, 5844 bp, Homo sapiens
  misc_feature: Template ID: 341546.3
  unsure 1051-1077: a, t, c, g, or other
cgtgagactcgcgccctccggcacggaaaaggccaggcgacaggtgtcgcttgaaaagactggggcttgtccttgctggtgcatgcgtcgtcggcctctgggcagcaggtttacaaaggaggaaaacgacttcttctagatttttttttcagtttcttctataaatcaaaacatctcaaaatggagacctaaaatccttaaagggacttagtctaatctcgggaggtagttttgtgcatgggtaaacaaattaagtattaactggtgttttactatccaaagaatgctaattttataaacatgatcgagttatataaggtataccataatgagtttgattttgaatttgatttgtggaaataaaggaaaagtgattctaggctggggcatattgttaaagcatttttttcagagttggccaggcagtctcctactggcacattctcccattatgtagaatagaaatagtacctgtgtttgggaaagattttaaaatgagtgacagttatttggaacaaagagctaataatcaatccactgcaaattaaagaaacatgcagatgaaagttttgacacattaaaatacttctacagtgacaaagaaaaatcaagaacaaagctttttgatatgtgcaacaaatttagaggaagtaaaaagataaatgtgatgattggtcaagaaattatccagttatttacaaggccactgatattttaaacgtccaaaagtttgtttaaatgggctgttaccgctgagaatgatgaggatgagaatgatggttgaaggttacattttaggaaatgaagaaacttagaaaattaatataaagacagtgatgaatacaaagaagatttttataacaatgtgtaaaatttttggccagggaaaggaatattgaagttagatacaattacttacctttgagggaaataattgttggtaatgagatgtgatgtttctcctgccacctggaaacaaagcattgaagtctgcagttgaaaagcccaacgtctgtgagatccaggaaaccatgcttgcaaaccactggtnnnnnnnnnnnnnnnnnnnnnnnnnnngccacagtgacttgcttattggtcattgctagtattatcgactcagaacctctttactaatggctagtaaatcataattgagaaattctgaattttgacaaggtctctgctgttgaaatggtaaatttattattttttttgtcatgataaattctggttcaaggtatgctatccatgaaataatttctgaccaaaactaaattgatgcaatttgattatccatcttagcctacagatggcatctggtaacttttgactgttttaaaaaataaatccactatcagagtagatttgatgttggcttcagaaacatttagaaaaacaaaagttcaaaaatgttttcaggaggtgataagttgaataactctacaatgttagttctttgagggggacaaaaaatttaaaatctttgaaaggtcttattttacagccatatctaaattatcttaagaaaatttttaacaaagggaatgaaatatatatcatgattctgtttttccaaaagtaacctgaatatagctatgaagttcagttttgttattggtagtttgggcagagtctctttttggcagcacctgttgtctaccataattacagaggacatttccatgttctagccaagtatactattagaataaaaaaacttaacattgagttgcttcaacagcatgaaactgagtccaaaagaccaaatgaacaaacacattaatctctgattatttattttaaatagaatatttaattgtgtaagatctaatagtatcattatacttaagcaatcatattcctgatgatctatgggaaataactattatttaattaatattgaaaccaggttttaagatgtgttagccagtcctgttactagtaaatctctttatttggagagaaattttagattgttttgttctccttattagaaggattgtagaaagaaaaaaatgactaattggagaaaaattggggatatatcatatttcactgaattcaaaatgtcttcagttgtaaatcttaccattattttacgtacctctaagaaataaaagtgcttctaattaaaatatgatgtattaattatgaaatacttcttgataacagaagttttaaaatagccatcttagaatcagtgaaatatggtaatgtattattttcctcctttgagttaggtcttgtgcttttttttcctggccactaaatttcacaatttccaaaaagcaaaataaacatattctgaatatttttgctgtgaaacacttgacagcagagctttccaccatgaaaagaagcttcatgagtcacacattacatctttgggttgattgaatgccactgaaacattctagtagcctggagaagttgacctacctgtggagatgcctgccattaaatggcatcctgatggcttaatacacatcactcttctgtgaagggttttaattttcaacacagcttactctgtagcatcatgtttacattgtatgtataaagattatacaaaggtgcaattgtgtatttcttccttaaaatgtatcagtataggatttagaatctccatgttgaaactctaaatgcatagaaataaaaataataaaaaatttttcattttggcttttcagcctagtattaaaactgataaaagcaaagccatggcacaaaactacctccctagagaaaggctagtcccttttcttccccattcatttcattatgaacatagtagaaaacagcatattcttatcaaatttgatgaaaagcgccaacacgtttgaactgaaatacgacttgtcatgtgaactgtaccgaatgtctacgtattccacttttcctgctggggttcctgtctcagaaaggagtcttgctcgtgctggtttctattacactggtgtgaatgacaaggtcaaatgcttctgttgtggcctgatgctggataactggaaaagaggagacagtcctactgaaaagcataaaaagttgtatcctagctgcagattcgttcagagtctaaattccgttaacaacttggaagctacctctcagcctacttttccttcttcagtaacaaattccacacactcattacttccgggtacagaaaacagtggatatttccgtggctcttattcaaactctccatcaaatcctgtaaactccagagcaaatcaagatttttctgccttgatgagaagttcctaccactgtgcaatgaataacgaaaatgccagattacttacttttcagacatggccattgacttttctgtcgccaacagatctggcaaaagcaggcttttactacataggacctggagacagagtggcttgctttgcctgtggtggaaaattgagcaattgggaaccgaaggataatgctatgtcagaacacctgagacattttcccaaatgcccatttatagaaaatcagcttcaagacacttcaagatacacagtttctaatctgagcatgcagacacatgcagcccgctttaaaacattctttaactggccctctagtgttctagttaatcctgagcagcttgcaagtgcgggtttttattatgtgggtaacagtgatgatgtcaaatgcttttgctgtgatggtggactcaggtgttgggaatctggagatgatccatgggttcaacatgccaagtggtttccaaggtgtgagtacttgataagaattaaaggacaggagttcatccgtcaagttcaagccagttaccctcatctacttgaacagctgctatccacatcagacagcccaggagatgaaaatgcagagtcatcaattatccattttgaacctggagaagaccattcagaagatgcaatcatgatgaatactcctgtgattaatgctgccgtggaaatgggctttagtagaagcctggtaaaacagacagttcagagaaaaatcctagcaactggagagaattatagactagtcaatgatcttgtgttagacttactcaatgcagaagatgaaataagggaagaggagagagaaagagcaactgaggaaaaagaatcaaatgatttattattaatccggaagaatagaatggcactttttcaacatttgacttgtgtaattccaatcctggatagtctactaactgccggaattattaatgaacaagaacatgatgttattaaacagaagacacagacgtctttacaagcaagagaactgattgatacgattttagtaaaaggaaatattgcagccactgtattcagaaactctctgcaagaagctgaagctgtgttatatgagcatttatttgtgcaacaggacataaaatatattcccacagaagatgtttcagatctaccagtggaagaacaattgcggagactacaagaagaaagaacatgtaaagtgtgtatggacaaagaagtgtccatagtgtttattccttgtggtcatctagtagtatgcaaagattgtgctccttctttaagaaagtgtcctatttgtaggagtacaatcaagggtacagttcgtacatttctttcatgaagaagaaccaaaacatcatctaaactttagaattaatttattaaatgtattataactttaacttttatcctaatttggtttccttaaaatttttatttatttacaactcaaaaaaacattgttttgtgtaacatatttatatatgtatctaaaccatatgaacatatattttttagaaactaagagaatgataggcttttgttcttatgaacgaaaaagaggtagcactacaaacacaatattcaatcaaaatttcagcattattgaaattgtaagtgaagtaaaacttaagatatttgagttaacctttaagaattttaaatattttggcattgtactaataccgggaacatgaagccaggtgtggtggtatgtgcctgtagcccaggctgaggcaagagaattacttgagcccaggagtttgaatccatcctgggcagcatactgagaccctgcctttaaaaacaaacagaacaaaaacaaaacaccaggacacatttctctgtcttttttgatcagtgtcctatacatcgaaggtgtgcatatatgttgaatgacattttagggacatggtgtttttataaagaattctgtgagaaaaaatttaataaagcaacaaaaattactcttattcttcattgctttatttcaatgacattggatagtttagtcactcccagactctttccataccttcttaaagcctctcaaatattgaactacagtttatactccttcccataagatgcttcttcattgacacttgtagaacacggggtcaacacatcataaaatctattatggaatgcctgagacaagaatcaaacagtccctttagtaagtttgtttattcacttctctattgattcattcaagaagtctcatgccagccccacctattggaagaaggtctgagttttattcttatctctttggtattaattctgaaacttagaaagtacactggttagcaatgcttgggaccaacaggttgttctggtaaataaatctgtttcatattgtcagtgcaacaaaatgtccccctctgcattatgttattggtactcaacacgtccgagtcataactctgtcctttgcttcttatagaggtattaggtcttcaagagcagaagtaagactgtaatagggaatactcaggggaaggcaggcaaaggctagtcatctaaaccagttctagatgtctgtataggggcagatggctctgtaagggcagaagggaaagac

SEQ ID NO: 254 - DNA, 1212 bp, Homo sapiens
  misc_feature: Template ID: 400834.2
cgctgtcgtcacgcgtcccgcgcctcctcgcgcctgcgccgtggttggaaggtcgtccctgtgaccggcttggcggttggagcggctgtcgccatgttgtcggtagcagcccgctcgggcccgttcgcgcccgtccctgtcggccacgtcccgcggggtggcggggcgcgctgcggcccttggtgcaggccacggtgcccgccaccccggagcagcctgtgttggacctgaagcggcccttcctcagccgggagtcgctgagcggccaggccgtgcgccggcctttggtcgcctccgtgggcctcaatgtccctgcttctgtttgttattcccacacagacatcaaggtgcctgacttctctgaataccgccgccttgaagttttagatagtacgaagtcttcaagagaaagcagcgaggctaggaaaggtttctcctatttggtaactggagtaactactgtgggtgtcgcatatgctgccaagaatgccgtcacccagttcgtttccagcatgagtgcttctgctgatgtgttggccctggcgaaaatcgaaatcaagttatccgatattccagaaggcaagaacatggctttcaaatggagaggcaaacccctgtttgtgcgtcatagaacccagaaggaaattgagcaggaagctgcagttgaattatcacagttgagggacccacagcatgatctagatcgagtaaagaaacctgaatgggttatcctgataggtgtttgcactcatcttggctgtgtacccattgcaaatgcaggagattttggtggttattactgcccttgccatgggtcacactatgatgcatctggcaggatcagattgggtcctgctcctctcaaccttgaagtccccacgtatgagttcaccagtgacgatatggtgattgttggttaagagacttggactcaagtcataggcttctttcagtctttatgtcacctcaggagacttatttgagaggaagccttctgtacttgaagttgatttgaaatatgtaagaattgatgatgtatttgcaaacattaatgtgaaataaattgaatttaatgttgaatactttcaggcattcacttaataaagacactgttaagcactgttatgctcagtcatacacgcgaaaggtacaatgtcttttagctaattctaattaaaaattacagactggtgtacaagatacttgtgaaat

SEQ ID NO: 255 - DNA, 3190 bp, Homo sapiens
  misc_feature: Template ID: 407740.1
  unsure 2588-2895: a, t, c, g, or other
cctttgaggcccaagggggagcgagccggtgctgctgcaggctgaggctgcggcagaggcggcgaggcgcgggcggtgaggacggacagtcaccgacttagtccagttccctgtgatctcaaaacaattgttgcagcaggctcctggcagtctcaagcagttcatcttcttggtgtactggtttcctattgtgattttatcatggaaaatcaattggctaaatcaactgaagaacgaacatttcagtaccaggattctcttccatcactgcctgttccttcacttgaagaatcattaaaaaaataccttgaatcagtgaaaccatttgcaaatcaagaagaatataagaaaactgaagaaatagttcaaaaatttcaaagtgggattggagaaaaattgcaccagaaattgcttgaaagagcaaaaggaaaaagaaattggctggaagagtggtggctgaatgttgcctatctggatgttcgtataccatcacaattgaatgtcaactttgcgggtcctgcagctcattttgaacactactggcctccaaaggaagggactcaattagaaagaggaagtataactctttggcataacttgaactactggcagctattaagaaaagaaaaagtgcctgttcataaagttggaaatactcctctagatatgaatcaattccgaatgctattttctacctgcaagttccaggaattactagagactccattatgaattattttaggactgagagtgaagggcgtcccccaaaccacattgtagtgctgtgtcgaggccgagcttttgtctttgatgtaatacatgaaggatgtttggtcaccccgccagagcttctcagacaactgacatatatccacaagaagtgccatagtgaacctgatggacctgggattgcagcattaactagtgaggagcgaactcgatgggctaaggcacgagaatatctgattggtcttgatccagagaacttggctttgttagaaaaaattcagagtagtttactggtatattccatggaggatagcagtccacatgtaacaccagaggattattctgagattattgcagccatccttattggagatccaacagtacgctggggtgacaaatcctataacttgatttccttttctaatggagtatttggctgtaattgtgatcatgctccttttgatgcaatgattatggtgaacatcagttattatgtggatgagaaaatttttcagaatgaaggaagatggaagggttcagagaaggtacgagatataccacttccagaagagctcattttcattgtggatgagaaagttttaaatgacatcaaccaagctaaagcccagtatctcagggaggcatctgatctacagattgcggcttatgcctttacatcttttggcaaaaagctaaccaagaacaagatgcttcacccggatacgtttattcagcttgcacttcagctggcctattacagacttcatggacaccctggttgttgctatgaaacagctatgacaagacatttttatcatggccgtacagagactatgcgatcatgcacagttgaagcagtgaggtggtgccagtccatgcaggatccttctgtcaatcttcgtgagcggcagcaaaagatgttacaagcttttgcaaagcataataaaatgatgaaagattgttcagctggaaaaggatttgatcgtcaccttttaggtctcttactcatagcaaaagaggaaggtcttcctgttccagaactctttacggacccacttttttccaaaagcggaggaggtggaaattttgttctctcaacaagtctggttggctatttacgagtccagggagtggtagttcccatggtacacaatggttatggatttttctaccatatcagagatgacaggtttgttgtggcctgttcagcctggaaatcctgtcccgagactgatgcggaaaagctagttcagctgactttttgtgcttttcatgatatgatacagctgatgaactctactcatctttagagatgaatcatctattaagcacttaccaaaacatatcattaaactgagtgctgggagtgagttggtaatatgagatgggaaggaatgttgacttgctaacattcctttaacaagttaagaaaacttgttaaatgtagaaattagtagaatcatgctctctaaatttattctgccatagaaggtagaaatatttttaagctcctctgatgcagcagcaatgcaaattatgacatagtgaatatagaactatgcagtatttaagcctcaacaatccaaatctacaaactttaacaatgcaagtcttactctaatttttaagtatttttgttggtacttacatgggttataaatcctctctctggacatcaatgtagagtccatctttcaagcactttaatttttttagctgccaaagggtatgaattacattattgtatgctaatttccctgaaatcaatgccttctatgttcaccacagggatacaagcctgttatgtttgatgggaaagaccactacaatctaatggtgatctaaaataacttttttgnnnnnnnnnnnnnnnnnnnnnnnnnnnnnnnnnnnnnnnnnnnnnnnnnnnnnnnnnnnnnnnnnnnnnnnnnnnnnnnnnnnnnnnnnnnnnnnnnnnnnnnnnnnnnnnnnnnnnnnnnnnnnnnnnnnnnnnnnnnnnnnnnnnnnnnnnnnnnnnnnnnnnnnnnnnnnnnnnnnnnnnnnnnnnnnnnnnnnnnnnnnnnnnnnnnnnnnnnnnnnnnnnnnnnnnnnnnnnnnnnnnnnnnnnnnnnnnnnnnnnnnnnnnnnnnnnnnnnnnnnnnnnnnnnnnnnnnnnnnnnnnnnnnnctcttttgaacaaacagacaaattagctagtagtatggagatgtataccctctattacacacataaaaccgtaacaaaattcattgtggtgtattataattagttttgtgaatagaaaaataaagcacttatgtttaaatttgttacagtgacttttaaaggattaatgttgaatcacattgtcagaattttttcctcctcgctgttcaattttgtagtttttactctcaaaaaatgaaattctcaaaattatatagctttttgttttgtttgaataaatgattcattcctgttt

SEQ ID NO: 256 - DNA, 602 bp, Homo sapiens
  misc_feature: Template ID: 1082684.1
  unsure 520: a, t, c, g, or other
atgatcagccttcgcggccccccttttttgtaccccaacttggggcgtatgaaggcttttggtctccctgagagtggctggaggcagccagggcttacctgtactctgacttaaggagagttggaaaaaagtgcacaccttaaaaaaaattcaatgaggaagcattaacaaaaacagtatttctgtacagtggacagcttagcatgttgacaactgagaataaaatgctcagttctgaactggacaatgtaagacacaacgacgaaacactggaaatggaaatccaattacatcattgtagactggctactgctctacatgattgtgaccaaagtcagagagctgaaagagacttctttccagagaacaagacatgaacaggtttatttacagaagacaatgaattctcatttgtctaacctaaaagattacagaatctttctcaacaagtctaatgtagacagtaaaatcaacaggctaaaaattaagttccatgaaacaagataaaactctgagaganaagatggggcaggccgccatctttcccgttcgggcaacttagtcattccagcctgagggctttggagagtacaaactgacca

SEQ ID NO: 257 - DNA, 559 bp, Homo sapiens
  misc_feature: Template ID: 318000.8
  unsure 548: a, t, c, g, or other
gttctagatcgcgagggacgctttttatttttttttggggatattttaaaagtttatttctattttaactagcccacagaccccattctttgagggctgatctgatttctgacaaatggtctatagaccctcctctcggaaacttactatccccttccaaaaaagtctgcaccttccatcatgatgcacattttaagttaaaattgccaatacaacccttaaaatgcaagtttattgaataaagctgagaagagcagtaaacagacaaaaaatgcatccacctaaataaaaaaattcacatatttacatagttcagtaactgttaaaagttttcacatgcagaggttaatgcacaggaaaatgttggtaatagcgtctggatgtcttgaaatgcggaaagcaatgtatagacacacaaacacattaaggtttagctataggtcaattaacaaacctatgcagtccccacagagtcacacattctagttccaattcctccttttaggcacaagcaagttgccacattctttgtaatggttcacactggnccattaatggt

SEQ ID NO: 258 - DNA, 6839 bp, Homo sapiens
  misc_feature: Template ID: 206382.35
  unsure 1835, 1841, 2315, 2679, 2688, 4462-4492, 4927, 5708-5725, 6427, 6491: a, t, c, g, or other
gtcggctggcggccgactgccccagaaaccccacccggcaccacacagaccccacccccgccctgcgccagccttcgtgcccgacagaggaccccccgacaccagcatggactgctgcaccgagaacgcctgctccaagccggacgacgacattctagacatcccgctggacgatcccggcgccaacgcggccgccgccaaaatccaggcgagttttcggggccacatggcgcggaagaagataaagagcggagagcgcggccggaagggcccgggccctggggggcctggcggagctggggtggcccggggaggcgcgggcggcggccccagcggagactaggccaggtgaggcgggcggcgcgcggctggctgacagctgcccttccacccagccctccccagagcaggggagaataaggcgggttggaggtgcagggggcgtggagggagctaagggttggggatagaaatccgagatgggaggtgggtgggaagaggctgaaggttgcgcggattccaggagctcacctgtttctccctctgcatcctcccttctgccccgccctggaccgaagaagaactgagcattttcaaaggtaatgaacacggccccctaggcggcgggggtggggaccgtgagtgggagaaaaggatcgaatcccagcccttccctctgcccaccctcaccctccagccggggaaatgcaccctgcccctgcgggttttgatacatccagacgcccgagctgcgacgggacatactgaccaagacatgcgcagccaccccatttggttgcacaagcccggccaaggggcagaaatacattgcggcgcgcacacgtacctgccgcggctcatttcagcgcttggtactcggggtgggggttctgggtgactgggccctctggcactcaccgcccaaagaatctggtactgaaagggggaagggtgggggaagaggagtagcagaagagggcaggttctcagaccttttctctcctcagttcccgaggagagatggatgccgcgtccccttcgcagcgacgagacttccctgccgtgtttgtgaccccctcctgcccagcaacctgccagctacaggagccccctgcgtcccagagactccctcacccaggcaggctccgtcgcggagtcgctgagtccgtgcccttttagttagttctgcagtctagtatggtccccatttgcccttccactccaccccaccctaaaccatgcgctcccaatcttccttcttttgcttctcgcccacctcttcccgcacccagcatgcagctctgcctccgcagcctcagtgcgctttcctgcgcgcactgcggagggcgccctaagcgtcacccaagcacactcacttaaagaaaaaacgagttctttcgttctgtgcgcagctaaaaggggcgccctacatctccgtgccactcccgccccagcctagccccaagactttggatccggggcgagatgaagggaagagggttgttttggtttcggacgacccttgctctgaccggaagagaagtccctatcccacacctgcctgtcacgttccctcccctttccccagcgcactgttgagggcagcctctccagctctcttgtttatgcaaacgccgagcgcctgggaggctcggtaggaggagtcttccacggccccgccccgcccctgtcggtcccgccctcccccccgccgggctcctggggctgtggccgaaaggtttctgatctccgtgtgtgcatgtgactgtgctgggttggaatgtgaacaataaagaggaatgtccaagtgttcagagggtgccgggggagggagnttgggngcacaaggcctccgcttgcaacttgaacaagcctccttgggccaaaccagaaaccaacaatcgggggctggtggggtgaagtggaggggcacctaggttgaaacccacccctttgacccgaccaaacttcctgcctaccttttctcggacttcaagcccattccttctcttactgttaatactctgagccgcctagaggaattcgccataccagcagaaagaagaaggagacagtatggtacccacagactttaattattgatattccccctcaccgccctcagggatcgggataagtcacacgaccatagggagcttggacttggtggtcgtcacggtgctggcagagggtctttccaggaaccccttgctagaatcagccctcatacaagtgtgctcagagatcccaggagcgatggcatcctccctgatgggtataggcaagttctgagtgaacagtagaagcctcctgcngaggagggccgtcctctaacctggggactcttaaatttcactgtgcttgagaataatctgcggaactttggttaaaatgaaatttctgggcctcatcactccccaacgcacaacttagaagtggcctgaatctgaatgtataactagttcccggtgatttctgtccaggtaatctgaggactccacctggagaaatgttgctctgatccctatcctagaccctgactggcagctaaagtggatgacagaggcagtttcccctcccctttcctgatttcctccacagaagaattgaactcagctgactgctcaggacaaatccatttcctggcatctacaagccactactactcccaggtggttnaaatatatnaaaatacttcggaacagaaaagtaaactttattaaatatgaggaggggcagggcagccctgcaaacagcttccctgccacagcttgtggaccagccactccaccctgtaccgtttgcctgtaccctcaaatacacaggttacactgctgccaccagcaaattccacggttgaacaacacctcctgcccctaaacacactgaatgatgtcggagtttgagggttgcaggcacccgcttttaactcaaggccctttcctccctccttgcgccaccccccagccctcctgctcaccgaaggtcactacccccatatgtctccttgggcttcttccccctctctttctggaacctgaccaggcagaacgcagcaactgacagcaacagcacgcccaggagcaccccaatcagagctccggccactcggccttgggagggttctaaggagatacaggaccctcactcagaattgcaggctttcctcggcccaccagccgacagcttccccaacacaaggctgctggcctggcctccacccagcatccctaccggtcacagagagggtcagctcacaggatgcactgctcatctggttggtggccacacagcggtaggtgcccgaggaggtcagggagaggttggtgagaatgagctggccagacacctcatctagaggatgaagaggaagtgttccacgactcattcaactcagtgagcagctctacgaggacagcacatttcatgtcatccttataacaatcctgtcagggagcaactaattttttttcactggggaggaaaccggttcagaagaaggaagtagtgtgtctgaggtgacccagagaggaattccaaagctgctacaacttacctgttctttccaccctacatagctgcctttttgggaggaggaggactgcacactcatgaaggattcagaaactggcaatggagtcggggtggggtgcttactggctgatgtcaggttcctggtttgggataaaaggcttgattgctagaaactgcatcctgtagggtggctctaagctgacacaaatgcttttctaaactgtttacctttgccttagaaggcagagcacataccaggaaggtgatctgggggtgggtcattcatttctggattgataaaggagtttgctggggctggagagagaactggatccaggaagaggaagccaagaaactaaggctcctccaaagaaactggttaaaagattccagccagtccatgctactctgcctcagtttcctctctaggaagtttggaagtggtccacgacccttaggaaacctaaaagaaatctccccaaggcagatgggtggtcatcatcagattgctccctgccctctactctcttccaggatatcagcagtatattcagcttgagaaatacccccaggatcatgcagccacagactgcagaaagacaggcaggagggaacaatacaggaagccaatgaagagacagggaaaggtatagtggtttgtgtcatacccctagtcatggaacggataatacgggtgtgtgggatttagagaccagatttgcccaggtctccagtaccctcttcctgatgccctgggcccttaccttgaaccatgctgccaggagaaggtgtaggaaaagttccaagacgcacccagttgtacactggcttaggagccccctcggaagagctgcatctcagtgcagtagagcctcccacagaggtttgtccactctgactgcataagggattactggggggaactgcnnnnnnnnnnnnnnnnnnnnnnnnnnnnnnngttcctcagcaatcttccagccccactcccaactccattaggtgctacattctctacttcaatacccctatcaaacagtggtcctcttgggtccacacacaccactgcatccccaggaactgagggatttccactattggaaattctgattgttagagaaaattcttcttcatgttgagccaaaatgtgtgttaacataacctccacccattggtttcagtttctgccctttggcccacaaagagaaattaaaatctctcctccacatgacagccctttggatagttgaatccagcagtaatacacccatccgaggccttctcttttccatctaaacactgccagtctctttgatagtttttctggttgctcatctctgaaaagctctagtttgggtgaggcagaagctctgagcacgaagttgtgctcagtaanaggggcccttgttccttttggtggccactccccttctctgccattgaccttggaggacagaatccaactaccgatgagagcctcccccatgatggagctgctgggagcaggctcagatccccatgtatggaaggactttctctcacacactctgttattaggctctgatggaggagatgctctcggtggagggtggagttggagtatgaccatctgaattagaagacttggaaagggagtattttcacttggggcccccagtgcagttgtgtgcttgggctaaaagtcagaaaccagagatttagcaagaccagtgcaaacgccccaagtatgtgaaagagtatgtggctcgtggatccccagtctgccttacccagcacagtaaggttgattagccccaacccattggtgtagaaatctggtgggttgttgacttggcagaggtaggttccagtatctgaggggtggacgtcagtcagtttcagtgtggccacccccactgtgggggggttctgaagcaggctgacccgctttgacttagaaccagttggatacagatggccattggtgaagtacaggatctggggagaggcagaagacacacatatgtgcctgtttctgcctggcatcaactctacagtccttcctcatcaaagtgggtataagaggcctctgacttacatcagccagggaggctgatacccttaagctggaactccaaaggtctctctgtccccaaacaccacccctttcaggtgctaaatgaacctgatccattggnnnnnnnnnnnnnnnnnnaaagagagaggcagaagaggcagcatattatcttggtatcagtcacaacaccttagtgtcaatggatacactaaaggcaggggagttggaaataggagctaggaagaggaaaggaagatacacggtcaggcagactgcagctctgaaaagatctagggagagcccacttaccttttcatccaagcatactgatccccaaacaccccctcccgaccccatgccctcatcctgggctcctgtccttccaggccaacccagcttcatgcagtcgctctcagctcactggatgggactcagagatgggtttcccaggctgcacaaagctccactccagggcgaagctgtctcccaacgacgtgctgtaggtgcaggtcagctcggctgtcttccccaggggcgtgctcagcggctctgtgggtaccttcacctccacggccagccctggggccggggaccagagggaggtgggaacccaaattccagtgatctggagggtcgggcccacccccgggcatctatattggaagctgggggctccctccccagagcacaaccctctcccctcaatccaacccctcccttcccaaaacctgaggtttccgggaggggccgggtctttgtgggtaaaagagccggaaccgggccaggtaagagggtgtgtgtgtttagcagagaaaggaaaacactagccctgcggtgggntggttcaggcctgtgccgcggagaggcccaactcgctcgccggcttgggggtctctctcctacncctccgggccttggacaccccctctccggcctcacctcaggcgccttagggcccctggcgcccacggcagcctcatctggcctggcggggacagagtgggtccgaggagccggggaagccaggcctatgccccccagccctcgccgtggtcccgcccggcccctcctcaccactcaggcacaggaagcctagcagggccccgcagagaaagggccccgggagctcggccatggccgcgtccggccgtcctgtcctgctcctgccaggtgggcggtcaaggtcggtctgggtgtcgggcagggaagggagcacccaagggcagccgcccgggctgggcaggagcgagac

SEQ ID NO: 259 - DNA, 1366 bp, Homo sapiens
  misc_feature: Template ID: 1090400.1
ttcactgatttgcatcctgagcaggaaagagcaggacagtgcaaaatttcatcacactattcacaatagcatgcaacttatgcatttatgttctgtgacatacaatgagagttgatttaacactaaaagatttcccacatttattacattcataaggtttctcccatatgaattatctgatgtttaatgagagttgacttcctactgaaggctttctcacagacactgcatttatagggtctctctccatatgaattttcttatgtttaatcagagttgacttctggataaaggtttttccacattcactgcattcatagggcttctcccctgtgtgagttctctggtgtgctatgagggttgacttctggctgaaggcttttgcacattcgcagcattcataaggtttctctccggtgtgagttctttgatgtacaactaagtttgctttctggataaacacttttccacattcagtacatttgtagagtttctccccagtttgacttctctgactttttctaagggcttgcttttggtggagggctttccctcgttgattagggtcaaaaaatctctctgcaggttgagctttatgaagattataatggaagcatactttccaatatgctttacatccatcatctttctttcttacatagcttccattttgaccaagaaagtttaaatgatgttttgaatgccttttcccacgaataatatttagggagtctttgccttacagaatcaaattctgtgctcagataaatgctttttctacatgttctggattcttgaccgctttcatccttcagtgtttccttgcctatgaatgcagcttgccaaggaagtttgtcttggctttccttgtagtgatctatctgctcatcaacttgccagacttctgcacaggtccgtaccggggtccccccatctgccatccaggactcttcacctggtcccaacctgaagatcacatctggcttcgcaactagataccccacggacaccaggtggctgtagttctcaagcatgacatccctgtagaggttcttctgggcagagtccagttgctgccactcctccagggtgaagtccacaaacacgtccttgaaggtcaatgattcctgggacatggccatcctgttctgctctggacaaaggatggagatctccttctgaggcctcagcctaagtcttctgagactaagtgaggaagctggggcacagataaactggagtctgaagtcggtgagcagtggtctcaggtctgcactctgaccttcaccgccaagagcctgaaacctcagaggccgctgacaacagccagtgtgaactagggaccgccctcccgggtcagcggagc

SEQ ID NO: 260 - DNA, 664 bp, Homo sapiens
  misc_feature: Template ID: 018342.1
attgaactcgagttggaagaggcgagtccggtctcaaaatggagggccatgatccaaaggaaccagagcagttgagaaaactgtttattggtggtctgagctttgaaactacagatgatagtttacgagaacattttgagaaatggggcacactcacagattgtgtggtaatgagagacccccaaacaaaacgttccaggggctttggttttgtgacttattcttgtgttgaagaggtggatgcagcaatgtgtgctcgaccacacaaggttgatgggcgtgtagtggaaccaaagagagctgtttctagagagagttctgtaaagcccagtgcccatccaacagtgaagaaaatttttgttggtgatgttaaagaagatacagaagaacataatttgagagactactttgaaaagtatcgcaagattgaaaccacagaagttacaggaggactggcagagtggaaaaaagagaggatttgcttttgtaacttttgatgatcatgataaaattgtggttcagaaataacactctattaacaggcgttagtgaagtgaaaagggccctttttaaacaacagatgcagttgtggagtggatctagcaactttatgggttgtggaggaaactttggagatggtagttttggccatgggtagaaactc
